(19) United States
(12) Patent Application Publication
(10) Pub. No.: US 2018/0230489 A1
(43) Pub. Date: Aug. 16, 2018

(54) REGULATABLE EXPRESSION USING ADENO-ASSOCIATED VIRUS (AAV)

(71) Applicant: Voyager Therapeutics, Inc., Cambridge, MA (US)

(72) Inventor: Robert KOTIN, Boston, MA (US)

(73) Assignee: Voyager Therapeutics, Inc., Cambridge, MA (US)

(21) Appl. No.: 15/772,023

(22) PCT Filed: Oct. 28, 2016
(86) PCT No.: PCT/US2016/059298

§ 371 Date: Apr. 27, 2018

Related U.S. Application Data
(60) Provisional application No. 62/247,365, filed on Oct. 28, 2015.
(60) Provisional application No. 62/298,640, filed on Feb. 23, 2016.

(51) Int. Cl. C12N 15/86; C12N 9/22; C12N 15/11; C07K 14/72

(52) U.S. Cl. CPC C12N 15/86; C12N 9/22; C12N 15/11; C07K 2319/80; C12N 2750/14141; C12N 2840/002; C12N 2310/20; C07K 14/721

(57) ABSTRACT

The present invention relates to viral particles which exhibit self-regulatory or regulatable features.

### CROSS REFERENCE TO RELATED APPLICATIONS

[0001] This application claims the benefit of U.S. Provisional Application No. U.S. 62/247,365 filed Oct. 28, 2015, entitled Regulatable Expression Using Adeno-Associate Virus (AAV), and U.S. Provisional Application No. U.S. 62/298,640 filed Feb. 23, 2016, entitled Regulatable Expression Using Adeno-Associate Virus (AAV), the contents of each are herein incorporated by reference in their entirety.

### REFERENCE TO THE SEQUENCE LISTING

[0002] The present application is being filed along with a Sequence Listing in electronic format. The Sequence Listing file, entitled 20571504PCT_SEQLST.txt, was created on Oct. 27, 2016 and is 5,113,878 bytes in size. The information in electronic format of the Sequence Listing is incorporated herein by reference in its entirety.

### FIELD OF THE INVENTION

[0003] The present invention relates to compositions, methods and processes for the design, preparation, manufacture and/or formulation of recombinant parvovirus, e.g. adeno-associated virus (AAV), particles having one or more regulatable elements and methods of using the same.

### BACKGROUND OF THE INVENTION

[0004] The present invention provides AAV-based compositions and complexes which go beyond those of the art in order to address the need for new technologies for treating genetic disorders caused by abnormalities in the genome whether heritable or acquired, monogenic or multifactorial.

[0005] AAV vectors are used for gene therapy for a number of reasons including their reduced immunogenicity and their sustained long-term presence and transgene expression in target tissues. Recombinant AAVs typically remain within target tissues as episomal entities over the lifetime of the animal host. Due to the long term stability of the AAV vector, it is desirable to exert tight control on transgene expression, e.g., the time, place and level of transgene expression must be controlled. For example, if transgene expression is no longer needed or undesirable, for example due to toxicity or side effects, efficient mechanisms are needed to turn expression off. In other cases, it may be desirable to turn reversibly transgene expression on and off very quickly.

[0006] A number of switches that function to regulate transgene expression in the context of cell systems and animal models have been described. One such mechanism of regulation relies on a chemical agent, such as a drug, or a physiological stimulus that acts as a switch to turn the expression of a transgene on or off. The most extensively studied regulatory switch mechanism is the Tet ON/OFF system, in which a tet repressor protein can only activate transcription from a promoter with a tet response element in the presence or absence of teracyclin, first described by Bujard and Gossen (Proc Natl Acad Sci USA. 1992 Jun. 15; 89(12):5547-51, Tight control of gene expression in mammalian cells by tetracycline-responsive promoters; the contents of which are herein incorporated by reference in its entirety). Several ligand and hormone regulatable systems, which employ the dimerization of two separate proteins for activation or repression, have also been described.

[0007] Approaches in which a second transgene encodes a regulatory enzyme such as a CRE recombinase, which modulates expression of a target transgene through site specific recombination, is extensively used in transgenic mouse studies, where a tissue restricted or temporally restricted expression pattern is desired.

[0008] In addition, transgene expression can also be controlled through regulation of transcript mRNA stability or protein stability, through the inclusion of stabilizing or destabilizing elements.

[0009] The present invention provides AAV-based compositions comprising a recombinant adeno-associated virus particles (AAV particles) having at least one regulatable element. These elements when used in association with AAV technology allow, for the first time, the regulatable tuning of payload expression from a viral genome delivered by an AAV particle.

### SUMMARY OF THE INVENTION

[0010] The present invention provides regulatable-AAV particles comprising at least one regulatable element to regulate the expression of a transgene or gene. Such regulation can be the inhibition or activation of transgene or gene expression or gene replacement. Such outcomes are achieved by utilizing regulatable elements encoded in the AAV particles (e.g., regulatable-AAV particles) described herein (e.g., the payload or VP2) in such a manner as to tune or control the level or degree of expression of the payload (whether a polynucleotide useful for gene knockdown, activation, or inhibition, or for gene replacement) encoded by the viral genome.

[0011] In one embodiment, the present invention is a composition comprising an AAV particle comprising a viral genome encoding at least one payload and the AAV particle may also comprise a viral genome encoding at least one regulatable element. As a non-limiting example, the viral genome encoding at least one regulatable element may be part of the payload. In some embodiments, one or more regulatable elements may include one or more proteins or fusion proteins. In a non-limiting example, the proteins or fusion proteins may be composed of a DNA binding domain, a transactivation domain or a repressor domain, a ligand binding domain and/or a dimerization domain. In some embodiments, the protein or fusion protein may be inducible through a ligand. In another non-limiting example, the proteins or fusion proteins may include a meganuclease, a zinc finger nuclease, a TALEN, a recombinase, an integrase, and/or a CRISPR Cas9. In one embodiment, the regulatable element may comprise a CRISPR Cas9 and may further comprise a single guide RNA (sgRNA).

[0012] In some embodiments, the protein or fusion protein may further include a destabilizing domain, which may be stabilized through a ligand and/or may include the estrogen receptor destabilizing domain.

[0013] In some embodiments, the regulatable element may comprise a regulatory RNA, such as a siRNA, microRNA (miRNA or miR) or ribozyme.

[0014] In some embodiments, the composition may include two or more regulatable elements, wherein the second regulatable element regulates the expression of the first regulatable element. A number of combinations of regulatable elements can be envisioned according to the invention and are described herein. In some embodiments, the payload and the regulatable elements may be located on the same viral genome. In some embodiments, the payload and the regulatable elements may be located on one or more separate viral genome.

[0015] In another embodiment, the present invention is a method of synthesizing a regulatable-AAV particle comprising a) introducing into competent bacterial cells i) a payload construct vector comprising a payload and one or more regulatable elements flanked on each side by a parvoviral ITR sequence to produce a payload construct expression vector; and ii) one or more viral construct vector(s) comprising parvoviral rep and/or cap gene sequences under the control of one or more regulatable elements to produce a viral construct expression vector; b) introducing into viral replication cells i) the payload construct expression vector produced in step (a.i) to produce a payload construct particle; and ii) the viral construct expression vector(s) produced in step (a.ii) to produce a viral construct particle; and c) co-infecting a viral replication cell with the payload construct viral particle produced in step (b.i) and the one or more viral construct viral particle(s) of step (b.ii) to produce a regulatable-AAV particle.

[0016] In another embodiment, one or more regulatable-AAV particles may be synthesized, wherein the payload and the regulatable element may be on separate payload constructs.

[0017] In another embodiment, the present invention may include one or more regulatable-AAV particles comprising a viral genome, the viral genome comprising: (a) at least one payload, and (b) at least one regulatable element.

[0018] In another embodiment, the present invention may include a method of treating a CNS disorder in a subject in need thereof, the method comprising administering to the subject a therapeutically effective amount of one or more regulatable-AAV particles comprising one or more viral genome, the viral genome comprising: (a) at least one payload, and (b) at least one regulatable element.

[0019] In one embodiment, provided are methods of regulating the expression of a protein of interest using one or more regulatable-AAV particle(s) a viral genome. In one aspect, the viral genome may have at least one payload and at least one regulatable element such as, but not limited to, a DNA binding domain which may be coupled with a transactivation domain. The regulatable element may be located in the VP2 capsid and may increase the expression of a protein of interest in a burst like fashion. The increase may be for at least 2 hours or may be for at least 6 hours.

[0020] In another aspect, the viral genome may have at least one payload and at least one CRISPR regulatable element such as, but not limited to, a cas9 endonuclease fused to a destabilizing domain or a Cpf1. The destabilizing domain may be a destabilizing domain from a protein family such as, but not limited to, FK506 Binding Protein (FKBP), E. coli dihyrofolate reductase (DHFR), mouse ornithine decarboxylase (MODC), and estrogen receptors (ER). As a non-limiting example, the destabilizing domain is from an estrogen receptor protein.

[0021] The details of one or more embodiments of the invention are set forth in the accompanying description below. Although any materials and methods similar or equivalent to those described herein can be used in the practice or testing of the present invention, the preferred materials and methods are now described. Other features, objects and advantages of the invention will be apparent from the description. In the description, the singular forms also include the plural unless the context clearly dictates otherwise. Unless defined otherwise, all technical and scientific terms used herein have the same meaning as commonly understood by one of ordinary skill in the art to which this invention belongs. In the case of conflict, the present description will control.

### DETAILED DESCRIPTION OF THE INVENTION

[0022] The present invention relates to compositions, methods and processes for the design, preparation, manufacture and/or formulation of recombinant adeno-associated virus (AAV) particles having one or more regulatable elements and methods of using the same. In one embodiment, the regulatable elements may comprise CRISPR regulatable elements.

### Parvoviridae Virus, Viral Particle and Production of Viral Particles

[0023] Viruses of the Parvoviridae family are small non-enveloped icosahedral capsid viruses characterized by a single stranded DNA genome. Parvoviridae family viruses consist of two subfamilies: Parvovirinae, which infect vertebrates, and Densovirinae, which infect invertebrates. The parvoviruses and other members of the Parvoviridae family are generally described in Kenneth I. Berns, “Parvoviridae: The Viruses and Their Replication,” Chapter 69 in FIELDS VIROLOGY (3d Ed. 1996), the contents of which is incorporated by reference in its entirety.

[0024] The genome of the viruses of the Parvoviridae family may be modified to contain a minimum of components for the assembly of a functional recombinant virus which is loaded with or engineered to express or deliver a desired nucleic acid construct or payload, e.g., a transgene, polypeptide-encoding polynucleotide or modulatory nucleic acid, which may be delivered to a target cell, tissue or organism. As used herein, a “viral particle” refers to a functional recombinant virus.

[0025] The Parvoviridae family may be used as a biological tool due to a relatively simple structure that may be manipulated with standard molecular biology techniques.

[0026] The Parvoviridae family comprises the Dependovirus genus which includes adeno-associated viruses (AAVs) which are capable of replication in vertebrate hosts including, but not limited to, human, primate, bovine, canine, equine, and ovine species. The naturally occurring AAV Cap gene expresses VP1, VP2, and VP3 capsid proteins are encoded by a single open reading frame of the Cap gene under control of the p40 promoter. In one embodiment, nucleotide sequences encoding VP1, VP2 and VP3 proteins and/or amino acid sequences of AAV VP capsid proteins may be modified for increased efficiency to target to the central nervous system (e.g., CNS tissue tropism). Any of the VP genes of the serotypes selected from, but not limited to, AAV1, AAV2, AAV3, AAV4, AAV5, AAV6, AAV7, AAV8, AAV9, AAV10, and AAV11, AAV12, AAVrh8, AAVrh10, AAV-DJ, and AAV-DJ/8 capsid serotypes, or variants thereof (e.g., AAV3A and AAV3B) may be modified.

[0027] In one embodiment, the present invention provides administration and/or delivery methods for viral particles.

[0028] In some embodiments, the present invention provides administration and/or delivery methods for viral particles for the treatment and/or amelioration of diseases or disorders of the CNS. As a non-limiting example, the disease or disorder of the CNS is Alzheimer's Diseases (AD), Amyotrophic lateral sclerosis (ALS), Creutzfeldt-Jakob Disease, Huntingtin's disease (HD), Friedreich's ataxia (FA or FRDA), Parkinson Disease (PD), Multiple System Atrophy (MSA), Spinal Muscular Atrophy (SMA), Multiple Sclerosis (MS), Primary progressive aphasia, Progressive supranuclear palsy, Dementia, Brain Cancer, Degenerative Nerve Diseases, Encephalitis, Epilepsy, Genetic Brain Disorders that cause neurodegeneration, Retinitis pigmentosa (RP), Head and Brain Malformations, Hydrocephalus, Stroke, Prion disease, Infantile neuronal ceroid lipofuscinosis (INCL) (a neurodegenerative disease of children caused by a deficiency in the lysosomal enzyme palmitoyl protein thioesterase-1 (PPT1)).

[0029] In one embodiment, provided are particles comprising nucleic acids and cells (in vivo or in culture) comprising the nucleic acids and/or particles of the invention. Suitable particles include without limitation viral particles (e.g., adenovirus, AAV, herpes virus, vaccinia, poxviruses, baculoviruses, and the like), plasmids, phage, YACs, BACs, and the like as are well known in the art. Such nucleic acids, particles and cells can be used, for example, as reagents (e.g., helper packaging constructs or packaging cells) for the production of modified virus capsids or virus particles as described herein.

[0030] The particles of the invention which comprise nucleic acids include any genetic element (vector) which may be delivered to a host cell, e.g., naked DNA, plasmid, phage, transposon, cosmid, episome, a protein in a non-viral delivery vehicle (e.g., a lipid-based carrier), virus, etc., which transfers the sequences carried thereon. The methods used to construct any embodiment of this invention are known to those with skill in nucleic acid manipulation and include genetic engineering, recombinant engineering, and synthetic techniques. See, e.g., Sambrook et al, Molecular Cloning: A Laboratory Manual, Cold Spring Harbor Press, Cold Spring Harbor, N.Y.

[0031] The polynucleotide (e.g., transgene or payload) can be carried on any suitable vector, e.g., a plasmid, which is delivered to a host cell. The plasmids useful in this invention may be engineered such that they are suitable for replication and, optionally, integration in prokaryotic cells, mammalian cells, or both. These plasmids may contain sequences permitting replication of the transgene in eukaryotes and/or prokaryotes and selection markers for these systems. Selectable markers or reporter genes may include sequences encoding geneticin, hygromicin or purimycin resistance, among others. The plasmids may also contain certain selectable reporters or marker genes that can be used to signal the presence of the vector in bacterial cells, such as ampicillin resistance. Other components of the plasmid may include an origin of replication and an amplicon, such as the amplicon system employing the Epstein Barr virus nuclear antigen. This amplicon system, or other similar amplicon components permit high copy episomal replication in the cells. Preferably, the molecule carrying the transgene or payload is transfected into the cell, where it may exist transiently. Alternatively, the transgene may be stably integrated into the genome of the host cell, either chromosomally or as an episome. In certain embodiments, the transgene may be present in multiple copies, optionally in head-to-head, head-to-tail, or tail-to-tail concatamers. Suitable transfection techniques are known and may readily be utilized to deliver the transgene to the host cell.

[0032] In some embodiments, the payload may be delivered in a viral particle derived from an adenoviral vector. In another embodiment, the payload may be delivered in a viral particle derived from a lentiviral vector. In yet another embodiment, the payload may be delivered in a viral particle derived from any other gene delivery vector known in the art.

### AAV Particle

[0033] In one embodiment, the present invention provides administration and/or delivery methods for AAV particles. As used herein, “AAV particles” refers to a viral particle where the virus is adeno-associated virus (AAV). An AAV particle comprises a viral genome and a capsid. As used herein, “viral genome” is a polynucleotide encoding at least one inverted terminal repeat (ITR), at least one regulatory sequence, and at least one payload. In one embodiment, the viral genome or any portion thereof may be codon optimized.

[0034] The AAV particles described herein may be useful in the fields of human disease, antibodies, viruses, veterinary applications and a variety of in vivo and in vitro settings.

[0035] In some embodiments, AAV particles described herein are useful in the field of medicine for the treatment, palliation and/or amelioration of conditions or diseases such as, but not limited to, blood, cardiovascular, CNS, and/or genetic disorders.

[0036] In some embodiments, AAV particles in accordance with the present invention may be used for the treatment of disorders, and/or conditions, including but not limited to neurological disorders (e.g., Alzheimer's disease, Huntington's disease, autism, Parkinson's disease, Spinal muscular atrophy, Friedreich's ataxia).

[0037] In some embodiments, the present invention provides administration and/or delivery methods for AAV particles for the treatment and/or amelioration of diseases or disorders of the CNS. As a non-limiting example, the disease or disorder of the CNS is Alzheimer's Diseases (AD), Amyotrophic lateral sclerosis (ALS), Creutzfeldt-Jakob Disease, Huntingtin's disease (HD), Friedreich's ataxia (FA or FRDA), Parkinson Disease (PD), Multiple System Atrophy (MSA), Spinal Muscular Atrophy (SMA), Multiple Sclerosis (MS), Primary progressive aphasia, Progressive supranuclear palsy, Dementia, Brain Cancer, Degenerative Nerve Diseases, Encephalitis, Epilepsy, Genetic Brain Disorders that cause neurodegeneration, Retinitis pigmentosa (RP), Head and Brain Malformations, Hydrocephalus, Stroke, Prion disease, Infantile neuronal ceroid lipofuscinosis (INCL) (a neurodegenerative disease of children caused by a deficiency in the lysosomal enzyme palmitoyl protein thioesterase-1 (PPT1)).

[0038] In some embodiments, AAV particles produced according to the present invention may target to deliver and/or to transfer a payload of interest to specific population of cells in specific anatomical regions (e.g., dopaminergic (DAergic) neurons in the Substantia Nigra (SN)) in the central nervous system).

[0039] In one embodiment, the AAV particles of the invention may be a single-stranded AAV (ssAAV) or a self-complementary AAV (scAAV) described herein or known in the art.

### Payload

[0040] AAV particles of the present invention may comprise a nucleic acid sequence encoding at least one “payload.” As used herein, a “payload” refers to one or more polynucleotides or polynucleotide regions encoded by or within a viral genome or an expression product of such polynucleotide or polynucleotide region, e.g., a transgene, a polynucleotide encoding a polypeptide or multi-polypeptide or a modulatory nucleic acid or regulatory nucleic acid.

[0041] The payload may comprise any nucleic acid known in the art which is useful for modulating the expression in a target cell transduced or contacted with the AAV particle carrying the payload. In one embodiment, modulation may be by supplementation of the payload in a target cell or tissue. In one embodiment, modulation may be gene replacement of the payload in a target cell or tissue. In one embodiment, modulation may be by inhibition using a modulatory nucleic acid of the payload in a target cell or tissue.

[0042] In one embodiment, the payload may comprise a combination of coding and non-coding nucleic acid sequences.

[0043] In one embodiment, the payload or any portion thereof may be codon optimized.

[0044] In one embodiment, the one or more payloads may comprise one or more regulatable elements. In one embodiment, payload expression may be governed by a regulatable system which comprises one or more regulatable elements.

mRNA

[0045] In one embodiment, a messenger RNA (mRNA) may be encoded by a payload. As used herein, the term “messenger RNA” (mRNA) refers to any polynucleotide which encodes a polypeptide of interest and which is capable of being translated to produce the encoded polypeptide of interest in vitro, in vivo, in situ, or ex vivo. The components of an mRNA include, but are not limited to, a coding region, a 5′UTR, a 3′UTR, a 5′ cap and a poly-A tail. In some embodiments, the encoded mRNA or any portion of the mRNA be codon optimized.

[0046] Traditionally, the basic components of an mRNA molecule include at least a coding region, a 5′UTR, a 3′UTR, a 5′ cap and a poly-A tail. According to the present invention, payloads encoding mRNA may comprise a coding region only. The payloads may also comprise a coding region and at least one UTR. The payloads may also comprise a coding region, 3′UTR and polyA tail.

[0047] In one embodiment, the mRNA may be codon optimized.

[0048] In one embodiment, the payload may encode a gene therapy product. A gene therapy product may comprise a polypeptide, RNA molecule, or other gene product that, when expressed in a target cell, provides a desired therapeutic effect. In some embodiments, a gene therapy product may comprise a substitute for a non-functional gene that is absent or mutated.

### Polypeptide

[0049] In one embodiment, the payload encodes a polypeptide which may be a peptide or protein. A protein encoded by the payload may comprise a secreted protein, an intracellular protein, an extracellular protein, a membrane protein, and/or fragment or variant thereof.

[0050] In one embodiment, the encoded proteins may be structural or functional.

[0051] In one embodiment, proteins encoded by the payload construct payload construct include, but are not limited to, mammalian proteins.

[0052] In one embodiment the protein encoded by the payload is between 50-5000 amino acids in length. In some embodiments the protein encoded is between 50-2000 amino acids in length. In some embodiments the protein encoded is between 50-1000 amino acids in length. In some embodiments the protein encoded is between 50-1500 amino acids in length. In some embodiments the protein encoded is between 50-1000 amino acids in length. In some embodiments the protein encoded is between 50-800 amino acids in length. In some embodiments the protein encoded is between 50-600 amino acids in length. In some embodiments the protein encoded is between 50-400 amino acids in length. In some embodiments the protein encoded is between 50-200 amino acids in length. In some embodiments the protein encoded is between 50-100 amino acids in length.

[0053] In some embodiments the peptide encoded by the payload is between 4-50 amino acids in length. In one embodiment, the shortest length of a region of the payload of the present invention encoding a peptide can be the length that is sufficient to encode for a tetrapeptide, a pentapeptide, a hexapeptide, a heptapeptide, an octapeptide, a nonapeptide, or a decapeptide. In another embodiment, the length may be sufficient to encode a peptide of 2-30 amino acids, e.g. 5-30, 10-30, 2-25, 5-25, 10-25, or 10-20 amino acids. The length may be sufficient to encode for a peptide of at least 11, 12, 13, 14, 15, 17, 20, 25 or 30 amino acids, or a peptide that is no longer than 50 amino acids, e.g. no longer than 35, 30, 25, 20, 17, 15, 14, 13, 12, 11 or 10 amino acids.

### Modulatory Nucleic Acids

[0054] In one embodiment, an RNA sequence encoded by the payload may be a tRNA, rRNA, tmRNA, miRNA, RNAi, siRNA, piRNA, shRNA antisense RNA, double stranded RNA, snRNA, snoRNA, and/or long non-coding RNA (lncRNA). These RNA sequences along with siRNA, shRNA, antisense molecules and the like may also be referred to as “modulatory nucleic acids.”

[0055] In one embodiment, the RNA encoded by the payload is a lncRNA or RNAi construct designed to target lncRNA. Non-limiting examples of such lncRNA molecules and RNAi constructs designed to target such lncRNA are taught in International Publication, WO2012/018881, the contents of which are incorporated by reference in their entirety.

[0056] In one embodiment, the payload encodes a microRNA (miRNA) or engineered precursors thereof, as the payload. MicroRNAs (miRNAs) are 19-25 nucleotide RNAs that bind to nucleic acid molecules and down-regulate gene expression either by reducing nucleic acid molecule stability or by inhibiting translation. As a non-limiting example, the payloads described herein may encode one or more microRNA target sequences, microRNA sequences, or microRNA seeds, or any known precursors thereof such as pre- or pri-microRNAs. Such sequences may correspond to any known microRNA such as those taught in US Publication US2005/0261218 and US Publication US2005/0059005, the contents of which are incorporated herein by reference in their entirety.

[0057] A microRNA sequence comprises a “seed” region, i.e., a sequence in the region of positions 2-8 of the mature microRNA, which sequence has perfect Watson-Crick complementarity to the miRNA target sequence. A microRNA seed may comprise positions 2-8 or 2-7 of the mature microRNA. In some embodiments, a microRNA seed may comprise 7 nucleotides (e.g., nucleotides 2-8 of the mature microRNA), wherein the seed-complementary site in the corresponding miRNA target is flanked by an adenine (A) opposed to microRNA position 1. In some embodiments, a microRNA seed may comprise 6 nucleotides (e.g., nucleotides 2-7 of the mature microRNA), wherein the seed-complementary site in the corresponding miRNA target is flanked by an adenine (A) opposed to microRNA position 1. See for example, Grimson A, Farh K K, Johnston W K, Garrett-Engele P, Lim L P, Bartel D P; Mol Cell. 2007 Jul. 6; 27(1):91-105; each of which is herein incorporated by reference in their entirety. The bases of the microRNA seed have complete complementarity with the target sequence.

[0058] In one embodiment, tissue specific microRNAs may be used for tissue specific regulation of the payload. For example, to allow for systemic administration targeting liver and brain, Xie et al. (Xie J, Xie Q, Zhang H, Ameres S L, Hung J H, Su Q, et al. MicroRNA-regulated, systemically delivered rAAV9: a step closer to CNS-restricted transgene expression. Molecular Therapy. 2010; 19(3):526-535), the contents of which is herein incorporated by reference in its entirety, used liver-specific, endogenous microRNAs (miRNAs) to repress rAAV expression outside the CNS, by including miRNA-binding sites into the rAAV9 construct.

[0059] In one embodiment, one or more microRNA binding sites may be included in the payload construct to de-target, i.e., to reduce or eliminate payload expression in a particular tissue. MicroRNA binding sites may be inserted 5′ or 3′ of the payload or both. In some embodiments, microRNA binding sites may be located within the payload sequence. In one embodiment, the micro RNA binding sites are all specific to one microRNA. In other embodiments, the microRNA binding sites are specific for two or more different microRNAs.

[0060] In one embodiment, the payload encodes an RNA sequence that may be processed to produce a siRNA, miRNA or other double stranded (ds) or single stranded (ss) gene modulatory nucleic acids or motifs.

[0061] In one embodiment, the siRNA duplexes or dsRNA encoded by the payload can be used to inhibit gene expression in a cell, in particular cells of the CNS. In some aspects, the inhibition of gene expression refers to an inhibition by at least about 20%, 30%, 40%, 50%, 60%, 70%, 80%, 85%, 90%, 95% and 100%. In one aspect, the protein product of the targeted gene may be inhibited by at least about 20%, 30%, 40%, 50%, 60%, 70%, 80%, 85%, 90%, 95% and 100%. The gene can be either a wild type gene or a gene with at least one mutation (mutated gene). The targeted protein may be either a wild type protein or a protein with at least one mutation (mutated protein).

[0062] In one embodiment, the present invention provides methods for treating, or ameliorating a disease or condition associated with abnormal gene and/or protein in a subject in need of treatment, the method comprising administering to the subject any effective amount of at least one AAV particle encoding an siRNA duplex targeting the gene, delivering duplex into targeted cells, inhibiting the gene expression and protein production, and ameliorating symptoms of the disease or condition in the subject.

### Gene Replacement or Activation

[0063] In one embodiment, the payload encodes an RNA sequence to increase the expression of a gene or replace a gene. As a non-limiting example, AAV particles may comprise a viral genome comprising a payload which encodes a normal gene to replace a mutated, defective or nonfunctional copy of that gene in the recipient.

[0064] In some aspects, the increase of gene expression refers to an increase by at least about 20%, 30%, 40%, 50%, 60%, 70%, 80%, 85%, 90%, 95% and 100%. In one aspect, the protein product of the targeted gene may be increased by at least about 20%, 30%, 40%, 50%, 60%, 70%, 80%, 85%, 90%, 95% and 100%.

### Functional Payloads

[0065] In one embodiment, a payload may encode polypeptides that are or can be a fusion protein.

[0066] In one embodiment, a payload may encode polypeptides that are or can be polypeptides having a desired biological activity.

[0067] In one embodiment, a payload may encode polypeptides that are or can be gene products that can complement a genetic defect.

[0068] In one embodiment, a payload may encode polypeptides that are or can be RNA molecules.

[0069] In one embodiment, a payload may encode polypeptides that are or can be transcription factors.

[0070] In one embodiment, a payload may encode polypeptides that are or can be other gene products that are of interest in regulation and/or expression.

[0071] In one embodiment, a payload may comprise nucleotide sequences that provide a desired effect or regulatory function (e.g., transposons, transcription factors).

[0072] In one embodiment, a payload may comprise nucleotide sequences or encode hormone receptors (e.g., mineral corticosteroid, glucocorticoid, and thyroid hormone receptors), intramembrane proteins (e.g., TM-1 and TM-7), intracellular receptors (e.g., orphans, retinoids, vitamin D3 and vitamin A receptors), signaling molecules (e.g., kinases, transcription factors, or molecules such as signal transducers and activators of transcription receptors of the cytokine superfamily (e.g. erythropoietin, growth hormone, interferons, and interleukins, and colony-stimulating factors, G-protein coupled receptors, e.g., hormones, calcitonin, epinephrine, gastrin, and paracrine or autocrine mediators, such as somatostatin or prostaglandins, neurotransmitter receptors (norepinephrine, dopamine, serotonin or acetylcholine), and/or pathogenic antigens which can be of viral, bacterial, allergenic, or cancerous origin, and tyrosine kinase receptors (such as insulin growth factor, and nerve growth factor).

[0073] The encoded payload may comprise a gene therapy product. In some embodiments, a gene therapy product may comprise a substitute for a non-functional gene that is absent or mutated.

[0074] In one embodiment, a payload may encode polypeptides that are or can be a marker to assess cell transformation and expression.

[0075] In one embodiment, a payload may comprise or encode a selectable marker. A selectable marker may comprise a gene sequence or a protein encoded by a gene sequence expressed in a host cell that allows for the identification, selection, and/or purification of the host cell from a population of cells that may or may not express the selectable marker. In one embodiment, the selectable marker provides resistance to survive a selection process that would otherwise kill the host cell, such as treatment with an antibiotic. In another embodiment, an antibiotic selectable marker may comprise one or more antibiotic resistance factors, including but not limited to neomycin resistance (e.g., neo), hygromycin resistance, kanamycin resistance, and/or puromycin resistance.

[0076] In some embodiments, a payload may comprise or encode any nucleic acid sequence encoding a polypeptide can be used as a selectable marker comprising recognition by a specific antibody.

[0077] In some embodiments, a payload may comprise or encode a cell-surface marker, such as any protein expressed on the surface of the cell including, but not limited to receptors, CD markers, lectins, integrins, or truncated versions thereof. In some embodiments, cells that comprise a cell-surface marker may be selected using an antibody targeted to the cell-surface marker. In some embodiments an antibody targeted to the cell-surface marker may be directly conjugated with a selection agent including, but not limited to a fluorophore, sepharose, or magnetic bead. In some embodiments an antibody targeted to the cell-surface marker may be detected using a secondary labeled antibody or substrate which binds to the antibody targeted to the cell-surface marker. In some embodiments, a selectable marker may comprise negative selection by using an enzyme, including but not limited to Herpes simplex virus thymidine kinase (HSVTK) that converts a pro-toxin (ganciclovir) into a toxin or bacterial Cytosine Deaminase (CD) which converts the pro-toxin 5′-fluorocytosine (5′-FC) into the toxin 5′-fluorouracil (5′-FU). In some embodiments, any nucleic acid sequence encoding a polypeptide can be used as a selectable marker comprising recognition by a specific antibody.

[0078] In some embodiments, a payload may comprise or encode a selectable marker including, but not limited to, β-lactamase, luciferase, β-galactosidase, or any other reporter gene as that term is understood in the art, including cell-surface markers, such as CD4 or the truncated nerve growth factor (NGFR) (for GFP, see WO 96/23810; Heim et al., Current Biology 2:178-182 (1996); Heim et al., Proc. Natl. Acad. Sci. USA (1995); or Heim et al., Science 373:663-664 (1995); for β-lactamase, see WO 96/30540; the contents of each of which are herein incorporated by reference in its entirety).

[0079] In some embodiments, a payload may comprise or encode a selectable marker comprising a fluorescent protein. A fluorescent protein as herein described may comprise any fluorescent marker including but not limited to green, yellow, and/or red fluorescent protein (GFP, YFP, and/or RFP).

[0080] In one embodiment, the AAV particles of the present invention are designed for expression of multiple functional RNAs in a single vector as described in Björklund et al (Expression of multiple functional RNAs or proteins from one viral vector; Methods in Molecular Biology; 2016; 1382:41-56), the contents of which are herein incorporated by reference in their entirety. In one embodiment, the viral genome is a polycistronic vector encoding fusion proteins, or comprising ribosome skipping sequence(s) or internal ribosome entry sites. In one embodiment, the AAV particles of the present invention designed for expression of multiple functional RNAs in a single vector utilize multiple promoters, such as, but not limited to bi-directional promoters (Pol II-based), dual promoters, combined Pol II and Pol III promoters, or dual Pol II promoters.

### Payload Construct

[0081] In one embodiment, the AAV particle may comprise a payload construct. As used herein, “payload construct” refers to one or more polynucleotide regions encoding or comprising a payload that is flanked on one or both sides by an inverted terminal repeat (ITR) sequence.

[0082] In one embodiment, the payload construct may comprise more than one payload. As a non-limiting example, a target cell transduced with an AAV particle comprising more than one payload may express each of the payloads in a single cell.

[0083] In some embodiments, the payload construct may encode a coding or non-coding RNA.

[0084] In one embodiment, a payload construct encoding one or more payloads for expression in a target cell may comprise one or more payload or non-payload nucleotide sequences operably linked to at least one target cell-compatible promoter.

[0085] In one embodiment, the ITRs in the AAV particle are derived from the same AAV serotype.

[0086] In one embodiment, the ITRs in the AAV particle are derived from different AAV serotypes.

[0087] In one embodiment, the ITRs in the AAV particle are the same.

[0088] In one embodiment, the ITRs in the AAV particle are different. In one aspect, the ITRs may be derived from the same AAV serotype. In another aspect, the ITRs may be derived from different serotypes.

[0089] In some embodiments, the payload construct may include a sequence that allows the translation of several proteins from a single construct (i.e., bicistronic or multicistronic construct). In a non-limiting example, such a sequence may include a cleavage site, such as a 2A peptide. In some embodiments, the 2A cleavage site may be a 2A peptide site from foot-and-mouth disease virus (F2A sequence), equine rhinitis A virus (E2A), Thosea asigna virus (T2A), and porcine teschovirus-1 (P2A), as described in US Publication No. 20070116690, the contents of which is herein incorporated by reference in its entirety. In some embodiments, the cleavage site may be a furin cleavage site known in the art. In another non-limiting example, such a regulatory sequence may include an internal ribosomal entry site (IRES), which allows for translation initiation in the middle of the transcript. In some embodiments, an internal stop codon may be positioned 5′ of the IRES.

### Promoters

[0090] A payload construct encoding one or more payloads for expression in a target cell may comprise one or more payload or non-payload nucleotide sequences operably linked to at least one target cell-compatible promoter. A person skilled in the art may recognize that a target cell may require a specific promoter including but not limited to a promoter that is species specific, inducible, tissue-specific, or cell cycle-specific (Parr et al., Nat. Med. 3: 1145-9 (1997)).

[0091] While a constitutive promoter drives ubiquitous and temporally unrestricted expression, tissue specific and/or inducible promoters allow more tight control of desired expression.

[0092] In some embodiments, expression of the payload may be desirable only in a particular tissue of interest. In one aspect, it may be desirable to exercise tight temporal control, i.e. turn the payload on or off in a particular tissue of interest. In some embodiments, this means that the promoter is not “leaky”, i.e., the promoter does not drive expression in another unwanted cell type or tissue or does not drive unwanted expression at a time when the promoter is not induced, even if it is at a lower level.

[0093] In some embodiments, the payload construct comprises a tissue specific promoter. Non-limiting examples of tissue specific promoters are listed in Table 1 and are for example described in Papadakis et al. 2004; Current Gene Therapy, 4, 98-113 and Kantor et al., 2014 Adv Genet. 2014; 87: 125-197, the contents of each which is herein incorporated by reference in its entirety, and references therein.

TABLE 1
Tissue Specific Promoters

| Promoter | Tissue |
|---|---|
| Apo A-I, ApoE, a1-antitrypsin (hAAT), Apo A-I, Transthyretin, | Liver |
| Liver-enriched activator, Albumin, Phosphoenolpyruvate | |
| carboxykinase (PEPCK), RNAPII promoter | |
| PAI-1 (plasminogen activator inhibitor 1), ICAM-2, Endoglin, | Endothelium |
| ICAM-2 (intercellular adhesion molecule 2), flt-1(fms-like | |
| tyrosine kinase-1), vWF (von-Willebrand factor) | |
| MCK (muscle creatine kinase), SMC a-actin, Myosin heavy- | Muscle |
| chain, Myosin light-chain | |
| Cytokeratin 18, CFTR (cystic fibrosis transmembrane | Epithelium |
| conductance regulator) | |
| GFAP (glial fibrillary acidic protein) | Neuronal (Astrocytes) |
| NSE (neuronal-specific endolase) | Neuronal (Neurons) |
| Synapsin I | Neuronal (Neurons) |
| Preproenkephalin | Neuronal (All of CNS) |
| Dopamine b-hydroxylase (dbH) | Neuronal |
| Prolactin | Neuronal |
| Myelin basic protein | Neuronal |
| | (Oligodendrocytes) |
| F4/80 | Neuronal (Microglia) |
| MeCP2 (MeP229) | Neuronal (Neurons) |
| MCH | Neuronal (MCH neurons) |
| CaMKII | Neuronal |
| Ankyrin, a-spectrin, Globin, HLA-Dra, CD4, Dectin-2 | Erythroid |

[0094] In one embodiment, a payload construct encoding one or more payloads for expression in a target cell may comprise one or more payload sequences operably linked to a tissue specific promoter which expresses only in certain tissues or cell types.

[0095] In one embodiment, a payload construct may comprise one or more payload sequences operably linked to a constitutive promoter which is continuously, strongly and ubiquitously expressed. Non-limiting examples of constitutive promoters included, but are not limited to, those described in Qin et al., (PLOS One, 2010; DOI: 10.1371/journal.pone.0010611) and those listed in Table 2.

TABLE 2
Constitutive Promoters

| Promoter | Reference |
|---|---|
| Cytomegalovirus (CMV) | Qin et al. and references therein |
| simian virus 40 early promoter (SV40) | Qin et al. and references therein |
| human Ubiquitin C promoter (UBC) | Qin et al. and references therein |
| human elongation factor 1α | Qin et al. and references therein |
| promoter (EF1A) | |
| mouse phosphoglycerate kinase | Qin et al. and references therein; |
| 1 promoter | |
| (PGK); human phosphoglycerate | Papadakis et al. 2004 and |
| kinase 1 (PGK1) | references therein |
| chicken β-Actin promoter coupled with | Qin et al. and references therein |
| glucose 6-phosphate dehydrogenase | Papadakis et al. 2004 and |
| | references therein |

[0096] In one embodiment, a payload construct encoding one or more payloads for expression in a target cell may comprise one or more payload sequences operably linked to one or more inducible promoters, such that the payload expression may be regulated in a temporal or spatial manner.

[0097] In some embodiments the inducible promoter may be a minimal promoter, which comprises one or more DNA binding elements for a transcription factor DNA binding domain, which is the main or sole driver of transcription from the promoter. In one embodiment, the promoter may be tightly controlled and is not leaky.

[0098] In one embodiment, the promoter may be a Pol II promoter, such as the CMV promoter.

[0099] In another embodiment, the promoter may be a Pol III promoter, such as the U6 promoter.

[0100] In one embodiment, the promoter may be a viral promoter.

[0101] In another embodiment, the promoter may be a non-viral promoter.

[0102] In one embodiment the promoter may comprise enhancer sequences, such as CMV IE enhancer.

[0103] In some embodiments, the payload may be under the control of an inducible promoter, which can be temporally regulated. The regulatable element may comprise a chemical agent (i.e. a natural or artificial ligand, compound or drug) or physiological stimulus.

[0104] Promoter inducible elements are regulated by exogenously provided chemical agents or physiological stimuli. In some embodiments, the payload expression occurs in a dose-dependent manner, depending on the dose of the chemical agent or physiological stimulus.

[0105] In some embodiments, the promoter may be a minimal promoter containing one or more DNA binding elements to which the DNA binding domain of a particular transcription factor or fusion protein binds, wherein transcription from the promoter can only occur upon binding of the transcription factor. The promoter may contain 1, 2, 3, 4, 5, 6, 7, 8, 9, 10 or more such binding elements.

[0106] In some embodiments, the inducible promoter may be tissue specific. In some embodiments, the inducible promoter may be neuron-specific. In some embodiments, the promoter may be the CamKII promoter, which may additionally comprise one or more promoter inducible elements. In some embodiments, the one or more inducible elements may be tetracycline-inducible tetracycline response elements. In one embodiment, the regulatable element may comprise a tetracycline inducible transactivator protein. In one embodiment, the inducible promoter driving payload expression may be the promoter described in US Publication No. US20120004277, the contents of which is herein incorporated by reference in its entirety.

[0107] In one embodiment, the promoter may comprise one or more HIV TAT protein binding elements. For example, the promoter may comprise the HIV-1 ITR fused to the Drosophila hsp70 minimal heat shock promoter, as described in U.S. Pat. No. 8,138,327, the contents of which is herein incorporated by reference in its entirety. Without wishing to be bound by theory, this would allow the promoter to be induced upon HIV infection. In this scenario, the promoter may drive the expression of a payload that inhibits HIV gene expression, such as an anti-HIV short hairpin RNA, as described in U.S. Pat. No. 8,138,327.

[0108] In one embodiment, the promoter may be the bovine leukemia virus promoter, which is inducible by the viral protein Tax. In another embodiment, Tax may be provided through the regulatable element as described in U.S. Pat. No. 7,297,536, the contents of which is herein incorporated by reference in its entirety.

[0109] In some embodiments, the promoter driving the expression of any of the regulatable elements described herein may also be regulated, i.e., may be inducible, repressible, tissue specific, or constitutive.

### Capsids and Capsid Serotypes

[0110] In some embodiments, AAV particles of the present invention may be packaged in a capsid structure or may be capsid free. Such capsid free donor and/or acceptor sequences such as AAV, are described in, for example, US Publication 20140107186, the content of which is incorporated by reference in its entirety.

[0111] In one embodiment, the present invention, provides nucleic acids encoding the mutated or modified virus capsids and capsid proteins of the invention. In some embodiments the capsids are engineered according to the methods of co-owned and co-pending International Publication No. WO2015191508, the contents of which are herein incorporated by reference in their entirety.

[0112] In some embodiments, AAV particles produced according to the present invention may comprise hybrid serotypes with enhanced transduction to specific cell types of interest in the central nervous system, prolonged transgene expression and/or a safety profile. The hybrid serotypes may be generated by transcapsidation, adsorption of bi-specific antibody to capsid surface, mosaic capsid, and chimeric capsid, and/or other capsid protein modifications.

[0113] In some embodiments, AAV particles of the present invention may be further modified toward a specific therapeutic application by rational mutagenesis of capsid proteins (see, e.g., Pulicherla et al., Mol Ther, 2011, 19: 1070-1078), incorporation of peptide ligands to the capsid, for example a peptide derived from an NMDA receptor agonist for enhanced retrograde transport (Xu et al., Virology, 2005, 341: 203-214), and directed evolution to produce new AAV variants for increased CNS transduction.

[0114] In some embodiments, AAV particles produced according to the present invention may comprise different capsid proteins, either naturally occurring and/or recombinant, including, but not limited to, AAV1, AAV2, AAV3, AAV4, AAV5, AAV6, AAV7, AAV8, AAV9, AAV10, and AAV11, AAV12, AAVrh8, AAVrh10, AAV-DJ, and AAV-DJ/8 capsid serotypes, or variants thereof (e.g., AAV3A and AAV3B). Nucleic acid sequences encoding one or more AAV capsid proteins useful in the present invention are disclosed in the commonly owned International Publication No. WO2015191508, the contents of which are herein incorporated by reference in their entirety.

[0115] In some embodiments, AAV particles of the present invention may comprise or be derived from any natural or recombinant AAV serotype. According to the present invention, the AAV particles may utilize or be based on a serotype selected from any of the following AAV1, AAV2, AAV2G9, AAV3, AAV3a, AAV3b, AAV3-3, AAV4, AAV4-4, AAV5, AAV6, AAV6.1, AAV6.2, AAV6.1.2, AAV7, AAV7.2, AAV8, AAV9, AAV9.11, AAV9.13, AAV9.16, AAV9.24, AAV9.45, AAV9.47, AAV9.61, AAV9.68, AAV9.84, AAV9.9, AAV10, AAV11, AAV12, AAV16.3, AAV24.1, AAV27.3, AAV42.12, AAV42-1b, AAV42-2, AAV42-3a, AAV42-3b, AAV42-4, AAV42-5a, AAV42-5b, AAV42-6b, AAV42-8, AAV42-10, AAV42-11, AAV42-12, AAV42-13, AAV42-15, AAV42-aa, AAV43-1, AAV43-12, AAV43-20, AAV43-21, AAV43-23, AAV43-25, AAV43-5, AAV44.1, AAV44.2, AAV44.5, AAV223.1, AAV223.2, AAV223.4, AAV223.5, AAV223.6, AAV223.7, AAV1-7/rh.48, AAV1-8/rh.49, AAV2-15/rh.62, AAV2-3/rh.61, AAV2-4/rh.50, AAV2-5/rh.51, AAV3.1/hu.6, AAV3.1/hu.9, AAV3-9/rh.52, AAV3-11/rh.53, AAV4-8/rh.64, AAV4-9/rh.54, AAV4-19/rh.55, AAV5-3/rh.57, AAV5-22/rh.58, AAV7.3/hu.7, AAV16.8/hu.10, AAV16.12/hu.11, AAV29.3/bb.1, AAV29.5/bb.2, AAV106.1/hu.37, AAV114.3/hu.40, AAV127.2/hu.41, AAV127.5/hu.42, AAV128.3/hu.44, AAV130.4/hu.48, AAV145.1/hu.53, AAV145.5/hu.54, AAV145.6/hu.55, AAV161.10/hu.60, AAV161.6/hu.61, AAV33.12/hu.17, AAV33.4/hu.15, AAV33.8/hu.16, AAV52/hu.19, AAV52.1/hu.20, AAV58.2/hu.25, AAVA3.3, AAVA3.4, AAVA3.5, AAVA3.7, AAVC1, AAVC2, AAVC5, AAV-DJ, AAV-DJ8, AAVF3, AAVF5, AAVH2, AAVrh.72, AAVhu.8, AAVrh.68, AAVrh.70, AAVpi.1, AAVpi.3, AAVpi.2, AAVrh.60, AAVrh.44, AAVrh.65, AAVrh.55, AAVrh.47, AAVrh.69, AAVrh.45, AAVrh.59, AAVhu.12, AAVH6, AAVLK03, AAVH-1/hu.1, AAVH-5/hu.3, AAVLG-10/rh.40, AAVLG-4/rh.38, AAVLG-9/hu.39, AAVN721-8/rh.43, AAVCh.5, AAVCh.5R1, AAVcy.2, AAVcy.3, AAVcy.4, AAVcy.5, AAVCy.5R1, AAVCy.5R2, AAVCy.5R3, AAVCy.5R4, AAVcy.6, AAVhu.1, AAVhu.2, AAVhu.3, AAVhu.4, AAVhu.5, AAVhu.6, AAVhu.7, AAVhu.9, AAVhu.10, AAVhu.11, AAVhu.13, AAVhu.15, AAVhu.16, AAVhu.17, AAVhu.18, AAVhu.20, AAVhu.21, AAVhu.22, AAVhu.23.2, AAVhu.24, AAVhu.25, AAVhu.27, AAVhu.28, AAVhu.29, AAVhu.29R, AAVhu.31, AAVhu.32, AAVhu.34, AAVhu.35, AAVhu.37, AAVhu.39, AAVhu.40, AAVhu.41, AAVhu.42, AAVhu.43, AAVhu.44, AAVhu.44R1, AAVhu.44R2, AAVhu.44R3, AAVhu.45, AAVhu.46, AAVhu.47, AAVhu.48, AAVhu.48R1, AAVhu.48R2, AAVhu.48R3, AAVhu.49, AAVhu.51, AAVhu.52, AAVhu.54, AAVhu.55, AAVhu.56, AAVhu.57, AAVhu.58, AAVhu.60, AAVhu.61, AAVhu.63, AAVhu.64, AAVhu.66, AAVhu.67, AAVhu.14/9, AAVhu.t 19, AAVrh.2, AAVrh.2R, AAVrh.8, AAVrh.8R, AAVrh.10, AAVrh.12, AAVrh.13, AAVrh.13R, AAVrh.14, AAVrh.17, AAVrh.18, AAVrh.19, AAVrh.20, AAVrh.21, AAVrh.22, AAVrh.23, AAVrh.24, AAVrh.25, AAVrh.31, AAVrh.32, AAVrh.33, AAVrh.34, AAVrh.35, AAVrh.36, AAVrh.37, AAVrh.37R2, AAVrh.38, AAVrh.39, AAVrh.40, AAVrh.46, AAVrh.48, AAVrh.48.1, AAVrh.48.1.2, AAVrh.48.2, AAVrh.49, AAVrh.51, AAVrh.52, AAVrh.53, AAVrh.54, AAVrh.56, AAVrh.57, AAVrh.58, AAVrh.61, AAVrh.64, AAVrh.64R1, AAVrh.64R2, AAVrh.67, AAVrh.73, AAVrh.74, AAVrh8R, AAVrh8R A586R mutant, AAVrh8R R533A mutant, AAAV, BAAV, caprine AAV, bovine AAV, AAVhE1.1, AAVhEr1.5, AAVhER1.14, AAVhEr1.8, AAVhEr1.16, AAVhEr1.18, AAVhEr1.35, AAVhEr1.7, AAVhEr1.36, AAVhEr2.29, AAVhEr2.4, AAVhEr2.16, AAVhEr2.30, AAVhEr2.31, AAVhEr2.36, AAVhER1.23, AAVhEr3.1, AAV2.5T, AAV-PAEC, AAV-LK01, AAV-LK02, AAV-LK03, AAV-LK04, AAV-LK05, AAV-LK06, AAV-LK07, AAV-LK08, AAV-LK09, AAV-LK10, AAV-LK11, AAV-LK12, AAV-LK13, AAV-LK14, AAV-LK15, AAV-LK16, AAV-LK17, AAV-LK18, AAV-LK19, AAV-PAEC2, AAV-PAEC4, AAV-PAEC6, AAV-PAEC7, AAV-PAEC8, AAV-PAEC11, AAV-PAEC12, AAV-2-pre-miRNA-101, AAV-8h, AAV-8b, AAV-h, AAV-b, AAV SM 10-2, AAV Shuffle 100-1, AAV Shuffle 100-3, AAV Shuffle 100-7, AAV Shuffle 10-2, AAV Shuffle 10-6, AAV Shuffle 10-8, AAV Shuffle 100-2, AAV SM 10-1, AAV SM 10-8, AAV SM 100-3, AAV SM 100-10, BNP61 AAV, BNP62 AAV, BNP63 AAV, AAVrh.50, AAVrh.43, AAVrh.62, AAVrh.48, AAVhu.19, AAVhu.11, AAVhu.53, AAV4-8/rh.64, AAVLG-9/hu.39, AAV54.5/hu.23, AAV54.2/hu.22, AAV54.7/hu.24, AAV54.1/hu.21, AAV54.4R/hu.27, AAV46.2/hu.28, AAV46.6/hu.29, AAV128.1/hu.43, true type AAV (ttAAV), UPENN AAV 10 and/or Japanese AAV 10 serotypes, and variants thereof. As a non-limiting example, the capsid of the recombinant AAV virus is AAV2. As a non-limiting example, the capsid of the recombinant AAV virus is AAVrh10. As a non-limiting example, the capsid of the recombinant AAV virus is AAV9(hu14). As a non-limiting example, the capsid of the recombinant AAV virus is AAV-DJ. As a non-limiting example, the capsid of the recombinant AAV virus is AAV9.47. As a non-limiting example, the capsid of the recombinant AAV virus is AAV-DJ8.

[0116] In some embodiments, the AAV particles of the present invention may comprise or be derived from an AAV serotype which may be, or have, a sequence as described in United States Publication No. US20030138772, the contents of which are herein incorporated by reference in their entirety, such as, but not limited to, AAV1 (SEQ ID NO: 6 and 64 of US20030138772), AAV2 (SEQ ID NO: 7 and 70 of US20030138772), AAV3 (SEQ ID NO: 8 and 71 of US20030138772), AAV4 (SEQ ID NO: 63 of US20030138772), AAV5 (SEQ ID NO: 114 of US20030138772), AAV6 (SEQ ID NO: 65 of US20030138772), AAV7 (SEQ ID NO: 1-3 of US20030138772), AAV8 (SEQ ID NO: 4 and 95 of US20030138772), AAV9 (SEQ ID NO: 5 and 100 of US20030138772), AAV10 (SEQ ID NO: 117 of US20030138772), AAV11 (SEQ ID NO: 118 of US20030138772), AAV12 (SEQ ID NO: 119 of US20030138772), AAVrh10 (amino acids 1 to 738 of SEQ ID NO: 81 of US20030138772), AAV16.3 (US20030138772 SEQ ID NO: 10), AAV29.3/bb.1 (US20030138772 SEQ ID NO: 11), AAV29.4 (US20030138772 SEQ ID NO: 12), AAV29.5/bb.2 (US20030138772 SEQ ID NO: 13), AAV1.3 (US20030138772 SEQ ID NO: 14), AAV13.3 (US20030138772 SEQ ID NO: 15), AAV24.1 (US20030138772 SEQ ID NO: 16), AAV27.3 (US20030138772 SEQ ID NO: 17), AAV7.2 (US20030138772 SEQ ID NO: 18), AAVC1 (US20030138772 SEQ ID NO: 19), AAVC3 (US20030138772 SEQ ID NO: 20), AAVC5 (US20030138772 SEQ ID NO: 21), AAVF1 (US20030138772 SEQ ID NO: 22), AAVF3 (US20030138772 SEQ ID NO: 23), AAVF5 (US20030138772 SEQ ID NO: 24), AAVH6 (US20030138772 SEQ ID NO: 25), AAVH2 (US20030138772 SEQ ID NO: 26), AAV42-8 (US20030138772 SEQ ID NO: 27), AAV42-15 (US20030138772 SEQ ID NO: 28), AAV42-5b (US20030138772 SEQ ID NO: 29), AAV42-1b (US20030138772 SEQ ID NO: 30), AAV42-13 (US20030138772 SEQ ID NO: 31), AAV42-3a (US20030138772 SEQ ID NO: 32), AAV42-4 (US20030138772 SEQ ID NO: 33), AAV42-5a (US20030138772 SEQ ID NO: 34), AAV42-10 (US20030138772 SEQ ID NO: 35), AAV42-3b (US20030138772 SEQ ID NO: 36), AAV42-11 (US20030138772 SEQ ID NO: 37), AAV42-6b (US20030138772 SEQ ID NO: 38), AAV43-1 (US20030138772 SEQ ID NO: 39), AAV43-5 (US20030138772 SEQ ID NO: 40), AAV43-12 (US20030138772 SEQ ID NO: 41), AAV43-20 (US20030138772 SEQ ID NO: 42), AAV43-21 (US20030138772 SEQ ID NO: 43), AAV43-23 (US20030138772 SEQ ID NO: 44), AAV43-25 (US20030138772 SEQ ID NO: 45), AAV44.1 (US20030138772 SEQ ID NO: 46), AAV44.5 (US20030138772 SEQ ID NO: 47), AAV223.1 (US20030138772 SEQ ID NO: 48), AAV223.2 (US20030138772 SEQ ID NO: 49), AAV223.4 (US20030138772 SEQ ID NO: 50), AAV223.5 (US20030138772 SEQ ID NO: 51), AAV223.6 (US20030138772 SEQ ID NO: 52), AAV223.7 (US20030138772 SEQ ID NO: 53), AAVA3.4 (US20030138772 SEQ ID NO: 54), AAVA3.5 (US20030138772 SEQ ID NO: 55), AAVA3.7 (US20030138772 SEQ ID NO: 56), AAVA3.3 (US20030138772 SEQ ID NO: 57), AAV42.12 (US20030138772 SEQ ID NO: 58), AAV44.2 (US20030138772 SEQ ID NO: 59), AAV42-2 (US20030138772 SEQ ID NO: 9), or variants thereof.

[0117] In some embodiments, the AAV particles of the present invention may comprise or be derived from AAV serotype which may be, or have, a sequence as described in United States Publication No. US20150159173, the contents of which are herein incorporated by reference in their entirety, such as, but not limited to, AAV2 (SEQ ID NO: 7 and 23 of US20150159173), rh20 (SEQ ID NO: 1 of US20150159173), rh32/33 (SEQ ID NO: 2 of US20150159173), rh39 (SEQ ID NO: 3, 20 and 36 of US20150159173), rh46 (SEQ ID NO: 4 and 22 of US20150159173), rh73 (SEQ ID NO: 5 of US20150159173), rh74 (SEQ ID NO: 6 of US20150159173), AAV6.1 (SEQ ID NO: 29 of US20150159173), rh.8 (SEQ ID NO: 41 of US20150159173), rh.48.1 (SEQ ID NO: 44 of US20150159173), hu.44 (SEQ ID NO: 45 of US20150159173), hu.29 (SEQ ID NO: 42 of US20150159173), hu.48 (SEQ ID NO: 38 of US20150159173), rh54 (SEQ ID NO: 49 of US20150159173), AAV2 (SEQ ID NO: 7 of US20150159173), cy.5 (SEQ ID NO: 8 and 24 of US20150159173), rh.10 (SEQ ID NO: 9 and 25 of US20150159173), rh.13 (SEQ ID NO: 10 and 26 of US20150159173), AAV1 (SEQ ID NO: 11 and 27 of US20150159173), AAV3 (SEQ ID NO: 12 and 28 of US20150159173), AAV6 (SEQ ID NO: 13 and 29 of US20150159173), AAV7 (SEQ ID NO: 14 and 30 of US20150159173), AAV8 (SEQ ID NO: 15 and 31 of US20150159173), hu.13 (SEQ ID NO: 16 and 32 of US20150159173), hu.26 (SEQ ID NO: 17 and 33 of US20150159173), hu.37 (SEQ ID NO: 18 and 34 of US20150159173), hu.53 (SEQ ID NO: 19 and 35 of US20150159173), rh.43 (SEQ ID NO: 21 and 37 of US20150159173), rh2 (SEQ ID NO: 39 of US20150159173), rh.37 (SEQ ID NO: 40 of US20150159173), rh.64 (SEQ ID NO: 43 of US20150159173), rh.48 (SEQ ID NO: 44 of US20150159173), ch.5 (SEQ ID NO 46 of US20150159173), rh.67 (SEQ ID NO: 47 of US20150159173), rh.58 (SEQ ID NO: 48 of US20150159173), or variants thereof including, but not limited to Cy5R1, Cy5R2, Cy5R3, Cy5R4, rh.13R, rh.37R2, rh.2R, rh.8R, rh.48.1, rh.48.2, rh.48.1.2, hu.44R1, hu.44R2, hu.44R3, hu.29R, ch.5R1, rh64R1, rh64R2, AAV6.2, AAV6.1, AAV6.12, hu.48R1, hu.48R2, and hu.48R3.

[0118] In some embodiments, the AAV particles of the present invention may comprise or be derived from AAV serotype which may be, or have, a sequence as described in U.S. Pat. No. 7,198,951, the contents of which are herein incorporated by reference in their entirety, such as, but not limited to, AAV9 (SEQ ID NO: 1-3 of U.S. Pat. No. 7,198,951), AAV2 (SEQ ID NO: 4 of U.S. Pat. No. 7,198,951), AAV1 (SEQ ID NO: 5 of U.S. Pat. No. 7,198,951), AAV3 (SEQ ID NO: 6 of U.S. Pat. No. 7,198,951), and AAV8 (SEQ ID NO: 7 of U.S. Pat. No. 7,198,951).

[0119] In some embodiments, the AAV particles of the present invention may comprise or be derived from AAV serotype which may be, or have, a mutation in the AAV9 sequence as described by N Pulicherla et al. (Molecular Therapy 19(6):1070-1078 (2011), herein incorporated by reference in its entirety), such as but not limited to, AAV9.9, AAV9.11, AAV9.13, AAV9.16, AAV9.24, AAV9.45, AAV9.47, AAV9.61, AAV9.68, AAV9.84.

[0120] In some embodiments, the AAV particles of the present invention may comprise or be derived from AAV serotype which may be, or have, a sequence as described in U.S. Pat. No. 6,156,303, the contents of which are herein incorporated by reference in their entirety, such as, but not limited to, AAV3B (SEQ ID NO: 1 and 10 of U.S. Pat. No. 6,156,303), AAV6 (SEQ ID NO: 2, 7 and 11 of U.S. Pat. No. 6,156,303), AAV2 (SEQ ID NO: 3 and 8 of U.S. Pat. No. 6,156,303), AAV3A (SEQ ID NO: 4 and 9, of U.S. Pat. No. 6,156,303), or derivatives thereof.

[0121] In some embodiments, the AAV particles of the present invention may comprise or be derived from AAV serotype which may be, or have, a sequence as described in United States Publication No. US20140359799, the contents of which are herein incorporated by reference in their entirety, such as, but not limited to, AAV8 (SEQ ID NO: 1 of US20140359799), AAVDJ (SEQ ID NO: 2 and 3 of US20140359799), or variants thereof.

[0122] In some embodiments, the AAV particle may comprise a capsid from a serotype such as, but not limited to, AAVDJ or a variant thereof, such as AAVDJ8 (or AAV-DJ8), as described by Grimm et al. (Journal of Virology 82(12): 5887-5911 (2008), herein incorporated by reference in its entirety). The amino acid sequence of AAVDJ8 may comprise two or more mutations in order to remove the heparin binding domain (HBD). As a non-limiting example, the AAV-DJ sequence described as SEQ ID NO: 1 in U.S. Pat. No. 7,588,772, the contents of which are herein incorporated by reference in their entirety, may comprise two mutations: (1) R587Q where arginine (R; Arg) at amino acid 587 is changed to glutamine (Q; Gln) and (2) R590T where arginine (R; Arg) at amino acid 590 is changed to threonine (T; Thr). As another non-limiting example, may comprise three mutations: (1) K406R where lysine (K; Lys) at amino acid 406 is changed to arginine (R; Arg), (2) R587Q where arginine (R; Arg) at amino acid 587 is changed to glutamine (Q; Gln) and (3) R590T where arginine (R; Arg) at amino acid 590 is changed to threonine (T; Thr).

[0123] In some embodiments, the AAV particles of the present invention may comprise or be derived from AAV serotype which may be, or have, a sequence of AAV4 as described in International Publication No. WO1998011244, the contents of which are herein incorporated by reference in their entirety, such as, but not limited to AAV4 (SEQ ID NO: 1-20 of WO1998011244).

[0124] In some embodiments, the AAV particles of the present invention may comprise or be derived from AAV serotype which may be, or have, a mutation in the AAV2 sequence to generate AAV2G9 as described in International Publication No. WO2014144229 and herein incorporated by reference in its entirety.

[0125] In some embodiments, the AAV particles of the present invention may comprise or be derived from AAV serotype which may be, or have, a sequence as described in International Publication No. WO2005033321, the contents of which are herein incorporated by reference in their entirety, such as, but not limited to AAV3-3 (SEQ ID NO: 217 of WO2005033321), AAV1 (SEQ ID NO: 219 and 202 of WO2005033321), AAV106.1/hu.37 (SEQ ID No: 10 of WO2005033321), AAV114.3/hu.40 (SEQ ID No: 11 of WO2005033321), AAV127.2/hu.41 (SEQ ID NO:6 and 8 of WO2005033321), AAV128.3/hu.44 (SEQ ID No: 81 of WO2005033321), AAV130.4/hu.48 (SEQ ID NO: 78 of WO2005033321), AAV145.1/hu.53 (SEQ ID No: 176 and 177 of WO2005033321), AAV145.6/hu.56 (SEQ ID NO: 168 and 192 of WO2005033321), AAV16.12/hu.11 (SEQ ID NO: 153 and 57 of WO2005033321), AAV16.8/hu.10 (SEQ ID NO: 156 and 56 of WO2005033321), AAV161.10/hu.60 (SEQ ID No: 170 of WO2005033321), AAV161.6/hu.61 (SEQ ID No: 174 of WO2005033321), AAV1-7/rh.48 (SEQ ID NO: 32 of WO2005033321), AAV1-8/rh.49 (SEQ ID NOs: 103 and 25 of WO2005033321), AAV2 (SEQ ID NO: 211 and 221 of WO2005033321), AAV2-15/rh.62 (SEQ ID No: 33 and 114 of WO2005033321), AAV2-3/rh.61 (SEQ ID NO: 21 of WO2005033321), AAV2-4/rh.50 (SEQ ID No: 23 and 108 of WO2005033321), AAV2-5/rh.51 (SEQ ID NO: 104 and 22 of WO2005033321), AAV3.1/hu.6 (SEQ ID NO: 5 and 84 of WO2005033321), AAV3.1/hu.9 (SEQ ID NO: 155 and 58 of WO2005033321), AAV3-11/rh.53 (SEQ ID NO: 186 and 176 of WO2005033321), AAV3-3 (SEQ ID NO: 200 of WO2005033321), AAV33.12/hu.17 (SEQ ID NO:4 of WO2005033321), AAV33.4/hu.15 (SEQ ID No: 50 of WO2005033321), AAV33.8/hu.16 (SEQ ID No: 51 of WO2005033321), AAV3-9/rh.52 (SEQ ID NO: 96 and 18 of WO2005033321), AAV4-19/rh.55 (SEQ ID NO: 117 of WO2005033321), AAV4-4 (SEQ ID NO: 201 and 218 of WO2005033321), AAV4-9/rh.54 (SEQ ID NO: 116 of WO2005033321), AAV5 (SEQ ID NO: 199 and 216 of WO2005033321), AAV52.1/hu.20 (SEQ ID NO: 63 of WO2005033321), AAV52/hu.19 (SEQ ID NO: 133 of WO2005033321), AAV5-22/rh.58 (SEQ ID No: 27 of WO2005033321), AAV5-3/rh.57 (SEQ ID NO: 105 of WO2005033321), AAV5-3/rh.57 (SEQ ID No: 26 of WO2005033321), AAV58.2/hu.25 (SEQ ID No: 49 of WO2005033321), AAV6 (SEQ ID NO: 203 and 220 of WO2005033321), AAV7 (SEQ ID NO: 222 and 213 of WO2005033321), AAV7.3/hu.7 (SEQ ID No: 55 of WO2005033321), AAV8 (SEQ ID NO: 223 and 214 of WO2005033321), AAVH-1/hu.1 (SEQ ID No: 46 of WO2005033321), AAVH-5/hu.3 (SEQ ID No: 44 of WO2005033321), AAVhu.1 (SEQ ID NO: 144 of WO2005033321), AAVhu.10 (SEQ ID NO: 156 of WO2005033321), AAVhu.11 (SEQ ID NO: 153 of WO2005033321), AAVhu.12 (WO2005033321 SEQ ID NO: 59), AAVhu.13 (SEQ ID NO: 129 of WO2005033321), AAVhu.14/AAV9 (SEQ ID NO: 123 and 3 of WO2005033321), AAVhu.15 (SEQ ID NO: 147 of WO2005033321), AAVhu.16 (SEQ ID NO: 148 of WO2005033321), AAVhu.17 (SEQ ID NO: 83 of WO2005033321), AAVhu.18 (SEQ ID NO: 149 of WO2005033321), AAVhu.19 (SEQ ID NO: 133 of WO2005033321), AAVhu.2 (SEQ ID NO: 143 of WO2005033321), AAVhu.20 (SEQ ID NO: 134 of WO2005033321), AAVhu.21 (SEQ ID NO: 135 of WO2005033321), AAVhu.22 (SEQ ID NO: 138 of WO2005033321), AAVhu.23.2 (SEQ ID NO: 137 of WO2005033321), AAVhu.24 (SEQ ID NO: 136 of WO2005033321), AAVhu.25 (SEQ ID NO: 146 of WO2005033321), AAVhu.27 (SEQ ID NO: 140 of WO2005033321), AAVhu.29 (SEQ ID NO: 132 of WO2005033321), AAVhu.3 (SEQ ID NO: 145 of WO2005033321), AAVhu.31 (SEQ ID NO: 121 of WO2005033321), AAVhu.32 (SEQ ID NO: 122 of WO2005033321), AAVhu.34 (SEQ ID NO: 125 of WO2005033321), AAVhu.35 (SEQ ID NO: 164 of WO2005033321), AAVhu.37 (SEQ ID NO: 88 of WO2005033321), AAVhu.39 (SEQ ID NO: 102 of WO2005033321), AAVhu.4 (SEQ ID NO: 141 of WO2005033321), AAVhu.40 (SEQ ID NO: 87 of WO2005033321), AAVhu.41 (SEQ ID NO: 91 of WO2005033321), AAVhu.42 (SEQ ID NO: 85 of WO2005033321), AAVhu.43 (SEQ ID NO: 160 of WO2005033321), AAVhu.44 (SEQ ID NO: 144 of WO2005033321), AAVhu.45 (SEQ ID NO: 127 of WO2005033321), AAVhu.46 (SEQ ID NO: 159 of WO2005033321), AAVhu.47 (SEQ ID NO: 128 of WO2005033321), AAVhu.48 (SEQ ID NO: 157 of WO2005033321), AAVhu.49 (SEQ ID NO: 189 of WO2005033321), AAVhu.51 (SEQ ID NO: 190 of WO2005033321), AAVhu.52 (SEQ ID NO: 191 of WO2005033321), AAVhu.53 (SEQ ID NO: 186 of WO2005033321), AAVhu.54 (SEQ ID NO: 188 of WO2005033321), AAVhu.55 (SEQ ID NO: 187 of WO2005033321), AAVhu.56 (SEQ ID NO: 192 of WO2005033321), AAVhu.57 (SEQ ID NO: 193 of WO2005033321), AAVhu.58 (SEQ ID NO: 194 of WO2005033321), AAVhu.6 (SEQ ID NO: 84 of WO2005033321), AAVhu.60 (SEQ ID NO: 184 of WO2005033321), AAVhu.61 (SEQ ID NO: 185 of WO2005033321), AAVhu.63 (SEQ ID NO: 195 of WO2005033321), AAVhu.64 (SEQ ID NO: 196 of WO2005033321), AAVhu.66 (SEQ ID NO: 197 of WO2005033321), AAVhu.67 (SEQ ID NO: 198 of WO2005033321), AAVhu.7 (SEQ ID NO: 150 of WO2005033321), AAVhu.8 (WO2005033321 SEQ ID NO: 12), AAVhu.9 (SEQ ID NO: 155 of WO2005033321), AAVLG-10/rh.40 (SEQ ID No: 14 of WO2005033321), AAVLG-4/rh.38 (SEQ ID NO: 86 of WO2005033321), AAVLG-4/rh.38 (SEQ ID No: 7 of WO2005033321), AAVN721-8/rh.43 (SEQ ID NO: 163 of WO2005033321), AAVN721-8/rh.43 (SEQ ID No: 43 of WO2005033321), AAVpi.1 (WO2005033321 SEQ ID NO: 28), AAVpi.2 (WO2005033321 SEQ ID NO: 30), AAVpi.3 (WO2005033321 SEQ ID NO: 29), AAVrh.38 (SEQ ID NO: 86 of WO2005033321), AAVrh.40 (SEQ ID NO: 92 of WO2005033321), AAVrh.43 (SEQ ID NO: 163 of WO2005033321), AAVrh.44 (WO2005033321 SEQ ID NO: 34), AAVrh.45 (WO2005033321 SEQ ID NO: 41), AAVrh.47 (WO2005033321 SEQ ID NO: 38), AAVrh.48 (SEQ ID NO: 115 of WO2005033321), AAVrh.49 (SEQ ID NO: 103 of WO2005033321), AAVrh.50 (SEQ ID NO: 108 of WO2005033321), AAVrh.51 (SEQ ID NO: 104 of WO2005033321), AAVrh.52 (SEQ ID NO: 96 of WO2005033321), AAVrh.53 (SEQ ID NO: 97 of WO2005033321), AAVrh.55 (WO2005033321 SEQ ID NO: 37), AAVrh.56 (SEQ ID NO: 152 of WO2005033321), AAVrh.57 (SEQ ID NO: 105 of WO2005033321), AAVrh.58 (SEQ ID NO: 106 of WO2005033321), AAVrh.59 (WO2005033321 SEQ ID NO: 42), AAVrh.60 (WO2005033321 SEQ ID NO: 31), AAVrh.61 (SEQ ID NO: 107 of WO2005033321), AAVrh.62 (SEQ ID NO: 114 of WO2005033321), AAVrh.64 (SEQ ID NO: 99 of WO2005033321), AAVrh.65 (WO2005033321 SEQ ID NO: 35), AAVrh.68 (WO2005033321 SEQ ID NO: 16), AAVrh.69 (WO2005033321 SEQ ID NO: 39), AAVrh.70 (WO2005033321 SEQ ID NO: 20), AAVrh.72 (WO2005033321 SEQ ID NO: 9), or variants thereof including, but not limited to, AAVcy.2, AAVcy.3, AAVcy.4, AAVcy.5, AAVcy.6, AAVrh.12, AAVrh.17, AAVrh.18, AAVrh.19, AAVrh.21, AAVrh.22, AAVrh.23, AAVrh.24, AAVrh.25, AAVrh.25/42 15, AAVrh.31, AAVrh.32, AAVrh.33, AAVrh.34, AAVrh.35, AAVrh.36, AAVrh.37, AAVrh14. Non limiting examples of variants include SEQ ID NO: 13, 15, 17, 19, 24, 36, 40, 45, 47, 48, 51-54, 60-62, 64-77, 79, 80, 82, 89, 90, 93-95, 98, 100, 101-109-113, 118-120, 124, 126, 131, 139, 142, 151,154, 158, 161, 162, 165-183, 202, 204-212, 215, 219, 224-236, of WO2005033321, the contents of which are herein incorporated by reference in their entirety.

[0126] In some embodiments, the AAV particles of the present invention may comprise or be derived from AAV serotype which may be, or have, a sequence as described in International Publication No. WO2015168666, the contents of which are herein incorporated by reference in their entirety, such as, but not limited to, AAVrh8R (SEQ ID NO: 9 of WO2015168666), AAVrh8R A586R mutant (SEQ ID NO: 10 of WO2015168666), AAVrh8R R533A mutant (SEQ ID NO: 11 of WO2015168666), or variants thereof.

[0127] In some embodiments, the AAV particles of the present invention may comprise or be derived from AAV serotype which may be, or have, a sequence as described in U.S. Pat. No. 9,233,131, the contents of which are herein incorporated by reference in their entirety, such as, but not limited to, AAVhE1.1 (SEQ ID NO:44 of U.S. Pat. No. 9,233,131), AAVhEr1.5 (SEQ ID NO:45 of U.S. Pat. No. 9,233,131), AAVhER1.14 (SEQ ID NO:46 of U.S. Pat. No. 9,233,131), AAVhEr1.8 (SEQ ID NO:47 of U.S. Pat. No. 9,233,131), AAVhEr1.16 (SEQ ID NO:48 of U.S. Pat. No. 9,233,131), AAVhEr1.18 (SEQ ID NO:49 of U.S. Pat. No. 9,233,131), AAVhEr1.35 (SEQ ID NO:50 of U.S. Pat. No. 9,233,131), AAVhEr1.7 (SEQ ID NO:51 of U.S. Pat. No. 9,233,131), AAVhEr1.36 (SEQ ID NO:52 of U.S. Pat. No. 9,233,131), AAVhEr2.29 (SEQ ID NO:53 of U.S. Pat. No. 9,233,131), AAVhEr2.4 (SEQ ID NO:54 of U.S. Pat. No. 9,233,131), AAVhEr2.16 (SEQ ID NO:55 of U.S. Pat. No. 9,233,131), AAVhEr2.30 (SEQ ID NO:56 of U.S. Pat. No. 9,233,131), AAVhEr2.31 (SEQ ID NO:58 of U.S. Pat. No. 9,233,131), AAVhEr2.36 (SEQ ID NO:57 of U.S. Pat. No. 9,233,131), AAVhER1.23 (SEQ ID NO:53 of U.S. Pat. No. 9,233,131), AAVhEr3.1 (SEQ ID NO:59 of U.S. Pat. No. 9,233,131), AAV2.5T (SEQ ID NO:42 of U.S. Pat. No. 9,233,131), or variants thereof.

[0128] In some embodiments, the AAV particles of the present invention may comprise or be derived from AAV serotype which may be, or have, a sequence as described in United States Patent Publication No. US20150376607, the contents of which are herein incorporated by reference in their entirety, such as, but not limited to, AAV-PAEC (SEQ ID NO:1 of US20150376607), AAV-LK01 (SEQ ID NO:2 of US20150376607), AAV-LK02 (SEQ ID NO:3 of US20150376607), AAV-LK03 (SEQ ID NO:4 of US20150376607), AAV-LK04 (SEQ ID NO:5 of US20150376607), AAV-LK05 (SEQ ID NO:6 of US20150376607), AAV-LK06 (SEQ ID NO:7 of US20150376607), AAV-LK07 (SEQ ID NO:8 of US20150376607), AAV-LK08 (SEQ ID NO:9 of US20150376607), AAV-LK09 (SEQ ID NO:10 of US20150376607), AAV-LK10 (SEQ ID NO:11 of US20150376607), AAV-LK11 (SEQ ID NO:12 of US20150376607), AAV-LK12 (SEQ ID NO:13 of US20150376607), AAV-LK13 (SEQ ID NO:14 of US20150376607), AAV-LK14 (SEQ ID NO:15 of US20150376607), AAV-LK15 (SEQ ID NO:16 of US20150376607), AAV-LK16 (SEQ ID NO:17 of US20150376607), AAV-LK17 (SEQ ID NO:18 of US20150376607), AAV-LK18 (SEQ ID NO:19 of US20150376607), AAV-LK19 (SEQ ID NO:20 of US20150376607), AAV-PAEC2 (SEQ ID NO:21 of US20150376607), AAV-PAEC4 (SEQ ID NO:22 of US20150376607), AAV-PAEC6 (SEQ ID NO:23 of US20150376607), AAV-PAEC7 (SEQ ID NO:24 of US20150376607), AAV-PAEC8 (SEQ ID NO:25 of US20150376607), AAV-PAEC11 (SEQ ID NO:26 of US20150376607), AAV-PAEC12 (SEQ ID NO:27, of US20150376607), or variants thereof.

[0129] In some embodiments, the AAV particles of the present invention may comprise or be derived from AAV serotype which may be, or have, a sequence as described in U.S. Pat. No. 9,163,261, the contents of which are herein incorporated by reference in their entirety, such as, but not limited to, AAV-2-pre-miRNA-101 (SEQ ID NO: 1 U.S. Pat. No. 9,163,261), or variants thereof.

[0130] In some embodiments, the AAV particles of the present invention may comprise or be derived from AAV serotype which may be, or have, a sequence as described in United States Patent Publication No. US20150376240, the contents of which are herein incorporated by reference in their entirety, such as, but not limited to, AAV-8h (SEQ ID NO: 6 of US20150376240), AAV-8b (SEQ ID NO: 5 of US20150376240), AAV-h (SEQ ID NO: 2 of US20150376240), AAV-b (SEQ ID NO: 1 of US20150376240), or variants thereof.

[0131] In some embodiments, the AAV particles of the present invention may comprise or be derived from AAV serotype which may be, or have, a sequence as described in United States Patent Publication No. US20160017295, the contents of which are herein incorporated by reference in their entirety, such as, but not limited to, AAV SM 10-2 (SEQ ID NO: 22 of US20160017295), AAV Shuffle 100-1 (SEQ ID NO: 23 of US20160017295), AAV Shuffle 100-3 (SEQ ID NO: 24 of US20160017295), AAV Shuffle 100-7 (SEQ ID NO: 25 of US20160017295), AAV Shuffle 10-2 (SEQ ID NO: 34 of US20160017295), AAV Shuffle 10-6 (SEQ ID NO: 35 of US20160017295), AAV Shuffle 10-8 (SEQ ID NO: 36 of US20160017295), AAV Shuffle 100-2 (SEQ ID NO: 37 of US20160017295), AAV SM 10-1 (SEQ ID NO: 38 of US20160017295), AAV SM 10-8 (SEQ ID NO: 39 of US20160017295), AAV SM 100-3 (SEQ ID NO: 40 of US20160017295), AAV SM 100-10 (SEQ ID NO: 41 of US20160017295), or variants thereof.

[0132] In some embodiments, the AAV particles of the present invention may comprise or be derived from AAV serotype which may be, or have, a sequence as described in United States Patent Publication No. US20150238550, the contents of which are herein incorporated by reference in their entirety, such as, but not limited to, BNP61 AAV (SEQ ID NO: 1 of US20150238550), BNP62 AAV (SEQ ID NO: 3 of US20150238550), BNP63 AAV (SEQ ID NO: 4 of US20150238550), or variants thereof.

[0133] In some embodiments, the AAV particles of the present invention may comprise or be derived from an AAV serotype which may be or may have a sequence as described in United States Patent Publication No. US20150315612, the contents of which are herein incorporated by reference in their entirety, such as, but not limited to, AAVrh.50 (SEQ ID NO: 108 of US20150315612), AAVrh.43 (SEQ ID NO: 163 of US20150315612), AAVrh.62 (SEQ ID NO: 114 of US20150315612), AAVrh.48 (SEQ ID NO: 115 of US20150315612), AAVhu.19 (SEQ ID NO: 133 of US20150315612), AAVhu.11 (SEQ ID NO: 153 of US20150315612), AAVhu.53 (SEQ ID NO: 186 of US20150315612), AAV4-8/rh.64 (SEQ ID No: 15 of US20150315612), AAVLG-9/hu.39 (SEQ ID No: 24 of US20150315612), AAV54.5/hu.23 (SEQ ID No: 60 of US20150315612), AAV54.2/hu.22 (SEQ ID No: 67 of US20150315612), AAV54.7/hu.24 (SEQ ID No: 66 of US20150315612), AAV54.1/hu.21 (SEQ ID No: 65 of US20150315612), AAV54.4R/hu.27 (SEQ ID No: 64 of US20150315612), AAV46.2/hu.28 (SEQ ID No: 68 of US20150315612), AAV46.6/hu.29 (SEQ ID No: 69 of US20150315612), AAV128.1/hu.43 (SEQ ID No: 80 of US20150315612), or variants thereof.

[0134] In some embodiments, the AAV particles of the present invention may comprise or be derived from AAV serotype which may be, or have, a sequence as described in International Publication No. WO2015121501, the contents of which are herein incorporated by reference in their entirety, such as, but not limited to, true type AAV (ttAAV) (SEQ ID NO: 2 of WO2015121501), “UPenn AAV10” (SEQ ID NO: 8 of WO2015121501), “Japanese AAV10” (SEQ ID NO: 9 of WO2015121501), or variants thereof.

[0135] According to the present invention, the AAV particle may comprise an AAV capsid serotype which may be selected from or derived from a variety of species. In one embodiment, the AAV may be an avian AAV (AAAV). The AAAV serotype may be, or have, a sequence as described in U.S. Pat. No. 9,238,800, the contents of which are herein incorporated by reference in their entirety, such as, but not limited to, AAAV (SEQ ID NO: 1, 2, 4, 6, 8, 10, 12, and 14 of U.S. Pat. No. 9,238,800), or variants thereof.

[0136] In one embodiment, the AAV particle may comprise an AAV capsid serotype which may be or derived from a bovine AAV (BAAV). The BAAV serotype may be, or have, a sequence as described in U.S. Pat. No. 9,193,769, the contents of which are herein incorporated by reference in their entirety, such as, but not limited to, BAAV (SEQ ID NO: 1 and 6 of U.S. Pat. No. 9,193,769), or variants thereof. The BAAV serotype may be or have a sequence as described in U.S. Pat. No. 7,427,396, the contents of which are herein incorporated by reference in their entirety, such as, but not limited to, BAAV (SEQ ID NO: 5 and 6 of U.S. Pat. No. 7,427,396), or variants thereof.

[0137] In one embodiment, the AAV particle may comprise an AAV capsid serotype which may be or derived from a caprine AAV. The caprine AAV serotype may be, or have, a sequence as described in U.S. Pat. No. 7,427,396, the contents of which are herein incorporated by reference in their entirety, such as, but not limited to, caprine AAV (SEQ ID NO: 3 of U.S. Pat. No. 7,427,396), or variants thereof.

[0138] In other embodiments, the AAV particle may comprise an AAV capsid serotype which may be engineered as a hybrid AAV from two or more parental serotypes. In one embodiment, the AAV may be AAV2G9 which comprises sequences from AAV2 and AAV9. The AAV2G9 AAV serotype may be, or have, a sequence as described in United States Patent Publication No. US20160017005, the contents of which are herein incorporated by reference in its entirety.

[0139] In one embodiment, the AAV particle may comprise an AAV capsid serotype which may be generated by the AAV9 capsid library with mutations in amino acids 390-627 (VP1 numbering) as described by Pulicherla et al. (Molecular Therapy 19(6):1070-1078 (2011), the contents of which are herein incorporated by reference in their entirety. The serotype and corresponding nucleotide and amino acid substitutions may be, but is not limited to, AAV9.1 (G1594C; D532H), AAV6.2 (T1418A and T1436X; V473D and I479K), AAV9.3 (T1238A; F413Y), AAV9.4 (T1250C and A1617T; F417S), AAV9.5 (A1235G, A1314T, A1642G, C1760T; Q412R, T548A, A587V), AAV9.6 (T1231A; F411I), AAV9.9 (G1203A, G1785T; W595C), AAV9.10 (A1500G, T1676C; M559T), AAV9.11 (A1425T, A1702C, A1769T; T568P, Q590L), AAV9.13 (A1369C, A1720T; N457H, T574S), AAV9.14 (T1340A, T1362C, T1560C, G1713A; L447H), AAV9.16 (A1775T; Q592L), AAV9.24 (T1507C, T1521G; W503R), AAV9.26 (A1337G, A1769C; Y446C, Q590P), AAV9.33 (A1667C; D556A), AAV9.34 (A1534G, C1794T; N512D), AAV9.35 (A1289T, T1450A, C1494T, A1515T, C1794A, G1816A; Q430L, Y484N, N98K, V6061), AAV9.40 (A1694T, E565V), AAV9.41 (A1348T, T1362C; T450S), AAV9.44 (A1684C, A1701T, A1737G; N562H, K567N), AAV9.45 (A1492T, C1804T; N498Y, L602F), AAV9.46 (G1441C, T1525C, T1549G; G481R, W509R, L517V), 9.47 (G1241A, G1358A, A1669G, C1745T; S414N, G453D, K557E, T5821), AAV9.48 (C1445T, A1736T; P482L, Q579L), AAV9.50 (A1638T, C1683T, T1805A; Q546H, L602H), AAV9.53 (G1301A, A1405C, C1664T, G1811T; R134Q, 5469R, A555V, G604V), AAV9.54 (C1531A, T1609A; L5111, L537M), AAV9.55 (T1605A; F535L), AAV9.58 (C1475T, C1579A; T4921, H527N), AAV.59 (T1336C; Y446H), AAV9.61 (A1493T; N4981), AAV9.64 (C1531A, A1617T; L5111), AAV9.65 (C1335T, T1530C, C1568A; A523D), AAV9.68 (C1510A; P504T), AAV9.80 (G1441A; G481R), AAV9.83 (C1402A, A1500T; P468T, E500D), AAV9.87 (T1464C, T1468C; S490P), AAV9.90 (A1196T; Y399F), AAV9.91 (T1316G, A1583T, C1782G, T1806C; L439R, K5281), AAV9.93 (A1273G, A1421G, A1638C, C1712T, G1732A, A1744T, A1832T; S425G, Q474R, Q546H, P571L, G578R, T582S, D611V), AAV9.94 (A1675T; M559L) and AAV9.95 (T1605A; F535L).

[0140] In one embodiment, the AAV particle of the present invention may have an AAV9 variant capsid serotype (AAV Clade F) as described in International Publication WO2016049230, the contents of which are herein incorporated by reference in their entirety.

[0141] In one embodiment the AAV particle of the present invention may have an AAV2g9 capsid as described in Murlidharan et al (CNS-restricted transduction and CRISPR/Cas9-mediated gene deletion with an engineered AAV vector; Molecular Therapy Nucleic Acids 5, e338; published online Jul. 19, 2016), the contents of which are herein incorporated by reference in their entirety. This capsid variant comprises an exchange of the amino acid residues of the AAV9 capsid required for galactose binding for the corresponding amino acids of the AAV2 capsid (Q464V, A467P, D469N, I470M, R471A, D472V, S474G, Y500F, and S501A). Further, the viral genome of the AAV may comprise one or more gRNAs targeting a microRNA (e.g., MIR137) as described for treatment of any disease or disorder. In one embodiment the disease to be treated is schizophrenia.

[0142] In one embodiment, the AAV particle may comprise an AAV capsid serotype which may be a serotype comprising at least one AAV capsid CD8+ T-cell epitope. As a non-limiting example, the serotype may be AAV1, AAV2 or AAV8.

[0143] In one embodiment, the AAV particle may comprise an AAV capsid serotype which may be a serotype selected from any of those found in Table 3.

[0144] In one embodiment, the AAV particle may comprise an AAV capsid serotype which may comprise a sequence, fragment or variant thereof, of the sequences in Table 3.

[0145] In one embodiment, the AAV particle may comprise an AAV capsid serotype which may be encoded by a sequence, fragment or variant as described in Table 3.

TABLE 3
AAV Serotypes

| | SEQ | |
|---|---|---|
| Serotype | ID NO | Reference Information |
| AAV1 | 1 | US20150159173 SEQ ID NO: 11, US20150315612 SEQ ID NO: 202 |
| AAV1 | 2 | US20160017295 SEQ ID NO: 1, US20030138772 SEQ ID NO: 64, |
| | | US20150159173 SEQ ID NO: 27, US20150315612 SEQ ID NO: 219, |
| | | U.S. Pat. No. 7,198,951 SEQ ID NO: 5 |
| AAV1 | 3 | US20030138772 SEQ ID NO: 6 |
| AAV1.3 | 4 | US20030138772 SEQ ID NO: 14 |
| AAV10 | 5 | US20030138772 SEQ ID NO: 117 |
| AAV10 | 6 | WO2015121501 SEQ ID NO: 9 |
| AAV10 | 7 | WO2015121501 SEQ ID NO: 8 |
| AAV11 | 8 | US20030138772 SEQ ID NO: 118 |
| AAV12 | 9 | US20030138772 SEQ ID NO: 119 |
| AAV2 | 10 | US20150159173 SEQ ID NO: 7, US20150315612 SEQ ID NO: 211 |
| AAV2 | 11 | US20030138772 SEQ ID NO: 70, US20150159173 SEQ ID NO: 23, |
| | | US20150315612 SEQ ID NO: 221, US20160017295 SEQ ID NO: 2, |
| | | U.S. Pat. No. 6,156,303 SEQ ID NO: 4, U.S. Pat. No. 7,198,951 SEQ ID NO: 4, |
| | | WO2015121501 SEQ ID NO: 1 |
| AAV2 | 12 | U.S. Pat. No. 6,156,303 SEQ ID NO: 8 |
| AAV2 | 13 | US20030138772 SEQ ID NO: 7 |
| AAV2 | 14 | U.S. Pat. No. 6,156,303 SEQ ID NO: 3 |
| AAV2.5T | 15 | U.S. Pat. No. 9,233,131 SEQ ID NO: 42 |
| AAV223.10 | 16 | US20030138772 SEQ ID NO: 75 |
| AAV223.2 | 17 | US20030138772 SEQ ID NO: 49 |
| AAV223.2 | 18 | US20030138772 SEQ ID NO: 76 |
| AAV223.4 | 19 | US20030138772 SEQ ID NO: 50 |
| AAV223.4 | 20 | US20030138772 SEQ ID NO: 73 |
| AAV223.5 | 21 | US20030138772 SEQ ID NO: 51 |
| AAV223.5 | 22 | US20030138772 SEQ ID NO: 74 |
| AAV223.6 | 23 | US20030138772 SEQ ID NO: 52 |
| AAV223.6 | 24 | US20030138772 SEQ ID NO: 78 |
| AAV223.7 | 25 | US20030138772 SEQ ID NO: 53 |
| AAV223.7 | 26 | US20030138772 SEQ ID NO: 77 |
| AAV29.3 | 27 | US20030138772 SEQ ID NO: 82 |
| AAV29.4 | 28 | US20030138772 SEQ ID NO: 12 |
| AAV29.5 | 29 | US20030138772 SEQ ID NO: 83 |
| AAV29.5 (AAVbb.2) | 30 | US20030138772 SEQ ID NO: 13 |
| AAV3 | 31 | US20150159173 SEQ ID NO: 12 |
| AAV3 | 32 | US20030138772 SEQ ID NO: 71, US20150159173 SEQ ID NO: 28, |
| | | US20160017295 SEQ ID NO: 3, U.S. Pat. No. 7,198,951 SEQ ID NO: 6 |
| AAV3 | 33 | US20030138772 SEQ ID NO: 8 |
| AAV3.3b | 34 | US20030138772 SEQ ID NO: 72 |
| AAV3-3 | 35 | US20150315612 SEQ ID NO: 200 |
| AAV3-3 | 36 | US20150315612 SEQ ID NO: 217 |
| AAV3a | 37 | U.S. Pat. No. 6,156,303 SEQ ID NO: 5 |
| AAV3a | 38 | U.S. Pat. No. 6,156,303 SEQ ID NO: 9 |
| AAV3b | 39 | U.S. Pat. No. 6,156,303 SEQ ID NO: 6 |
| AAV3b | 40 | U.S. Pat. No. 6,156,303 SEQ ID NO: 10 |
| AAV3b | 41 | U.S. Pat. No. 6,156,303 SEQ ID NO: 1 |
| AAV4 | 42 | US20140348794 SEQ ID NO: 17 |
| AAV4 | 43 | US20140348794 SEQ ID NO: 5 |
| AAV4 | 44 | US20140348794 SEQ ID NO: 3 |
| AAV4 | 45 | US20140348794 SEQ ID NO: 14 |
| AAV4 | 46 | US20140348794 SEQ ID NO: 15 |
| AAV4 | 47 | US20140348794 SEQ ID NO: 19 |
| AAV4 | 48 | US20140348794 SEQ ID NO: 12 |
| AAV4 | 49 | US20140348794 SEQ ID NO: 13 |
| AAV4 | 50 | US20140348794 SEQ ID NO: 7 |
| AAV4 | 51 | US20140348794 SEQ ID NO: 8 |
| AAV4 | 52 | US20140348794 SEQ ID NO: 9 |
| AAV4 | 53 | US20140348794 SEQ ID NO: 2 |
| AAV4 | 54 | US20140348794 SEQ ID NO: 10 |
| AAV4 | 55 | US20140348794 SEQ ID NO: 11 |
| AAV4 | 56 | US20140348794 SEQ ID NO: 18 |
| AAV4 | 57 | US20030138772 SEQ ID NO: 63, US20160017295 SEQ ID NO: 4, |
| | | US20140348794 SEQ ID NO: 4 |
| AAV4 | 58 | US20140348794 SEQ ID NO: 16 |
| AAV4 | 59 | US20140348794 SEQ ID NO: 20 |
| AAV4 | 60 | US20140348794 SEQ ID NO: 6 |
| AAV4 | 61 | US20140348794 SEQ ID NO: 1 |
| AAV42.2 | 62 | US20030138772 SEQ ID NO: 9 |
| AAV42.2 | 63 | US20030138772 SEQ ID NO: 102 |
| AAV42.3b | 64 | US20030138772 SEQ ID NO: 36 |
| AAV42.3B | 65 | US20030138772 SEQ ID NO: 107 |
| AAV42.4 | 66 | US20030138772 SEQ ID NO: 33 |
| AAV42.4 | 67 | US20030138772 SEQ ID NO: 88 |
| AAV42.8 | 68 | US20030138772 SEQ ID NO: 27 |
| AAV42.8 | 69 | US20030138772 SEQ ID NO: 85 |
| AAV43.1 | 70 | US20030138772 SEQ ID NO: 39 |
| AAV43.1 | 71 | US20030138772 SEQ ID NO: 92 |
| AAV43.12 | 72 | US20030138772 SEQ ID NO: 41 |
| AAV43.12 | 73 | US20030138772 SEQ ID NO: 93 |
| AAV43.20 | 74 | US20030138772 SEQ ID NO: 42 |
| AAV43.20 | 75 | US20030138772 SEQ ID NO: 99 |
| AAV43.21 | 76 | US20030138772 SEQ ID NO: 43 |
| AAV43.21 | 77 | US20030138772 SEQ ID NO: 96 |
| AAV43.23 | 78 | US20030138772 SEQ ID NO: 44 |
| AAV43.23 | 79 | US20030138772 SEQ ID NO: 98 |
| AAV43.25 | 80 | US20030138772 SEQ ID NO: 45 |
| AAV43.25 | 81 | US20030138772 SEQ ID NO: 97 |
| AAV43.5 | 82 | US20030138772 SEQ ID NO: 40 |
| AAV43.5 | 83 | US20030138772 SEQ ID NO: 94 |
| AAV4-4 | 84 | US20150315612 SEQ ID NO: 201 |
| AAV4-4 | 85 | US20150315612 SEQ ID NO: 218 |
| AAV44.1 | 86 | US20030138772 SEQ ID NO: 46 |
| AAV44.1 | 87 | US20030138772 SEQ ID NO: 79 |
| AAV44.5 | 88 | US20030138772 SEQ ID NO: 47 |
| AAV44.5 | 89 | US20030138772 SEQ ID NO: 80 |
| AAV4407 | 90 | US20150315612 SEQ ID NO: 90 |
| AAV5 | 91 | U.S. Pat. No. 7,427,396 SEQ ID NO: 1 |
| AAV5 | 92 | US20030138772 SEQ ID NO: 114 |
| AAV5 | 93 | US20160017295 SEQ ID NO: 5, U.S. Pat. No. 7,427,396 SEQ ID NO: 2, |
| | | US20150315612 SEQ ID NO: 216 |
| AAV5 | 94 | US20150315612 SEQ ID NO: 199 |
| AAV6 | 95 | US20150159173 SEQ ID NO: 13 |
| AAV6 | 96 | US20030138772 SEQ ID NO: 65, US20150159173 SEQ ID NO: 29, |
| | | US20160017295 SEQ ID NO: 6, U.S. Pat. No. 6,156,303 SEQ ID NO: 7 |
| AAV6 | 97 | U.S. Pat. No. 6,156,303 SEQ ID NO: 11 |
| AAV6 | 98 | U.S. Pat. No. 6,156,303 SEQ ID NO: 2 |
| AAV6 | 99 | US20150315612 SEQ ID NO: 203 |
| AAV6 | 100 | US20150315612 SEQ ID NO: 220 |
| AAV6.1 | 101 | US20150159173 |
| AAV6.12 | 102 | US20150159173 |
| AAV6.2 | 103 | US20150159173 |
| AAV7 | 104 | US20150159173 SEQ ID NO: 14 |
| AAV7 | 105 | US20150315612 SEQ ID NO: 183 |
| AAV7 | 106 | US20030138772 SEQ ID NO: 2, US20150159173 SEQ ID NO: 30, |
| | | US20150315612 SEQ ID NO: 181, US20160017295 SEQ ID NO: 7 |
| AAV7 | 107 | US20030138772 SEQ ID NO: 3 |
| AAV7 | 108 | US20030138772 SEQ ID NO: 1, US20150315612 SEQ ID NO: 180 |
| AAV7 | 109 | US20150315612 SEQ ID NO: 213 |
| AAV7 | 110 | US20150315612 SEQ ID NO: 222 |
| AAV8 | 111 | US20150159173 SEQ ID NO: 15 |
| AAV8 | 112 | US20150376240 SEQ ID NO: 7 |
| AAV8 | 113 | US20030138772 SEQ ID NO: 4, US20150315612 SEQ ID NO: 182 |
| AAV8 | 114 | US20030138772 SEQ ID NO: 95, US20140359799 SEQ ID NO: 1, |
| | | US20150159173 SEQ ID NO: 31, US20160017295 SEQ ID NO: 8, |
| | | U.S. Pat. No. 7,198,951 SEQ ID NO: 7, US20150315612 SEQ ID NO: 223 |
| AAV8 | 115 | US20150376240 SEQ ID NO: 8 |
| AAV8 | 116 | US20150315612 SEQ ID NO: 214 |
| AAV-8b | 117 | US20150376240 SEQ ID NO: 5 |
| AAV-8b | 118 | US20150376240 SEQ ID NO: 3 |
| AAV-8h | 119 | US20150376240 SEQ ID NO: 6 |
| AAV-8h | 120 | US20150376240 SEQ ID NO: 4 |
| AAV9 | 121 | US20030138772 SEQ ID NO: 5 |
| AAV9 | 122 | U.S. Pat. No. 7,198,951 SEQ ID NO: 1 |
| AAV9 | 123 | US20160017295 SEQ ID NO: 9 |
| AAV9 | 124 | US20030138772 SEQ ID NO: 100, U.S. Pat. No. 7,198,951 SEQ ID NO: 2 |
| AAV9 | 125 | U.S. Pat. No. 7,198,951 SEQ ID NO: 3 |
| AAV9 (AAVhu.14) | 126 | US20150315612 SEQ ID NO: 3 |
| AAV9 (AAVhu.14) | 127 | US20150315612 SEQ ID NO: 123 |
| AAVA3.1 | 128 | US20030138772 SEQ ID NO: 120 |
| AAVA3.3 | 129 | US20030138772 SEQ ID NO: 57 |
| AAVA3.3 | 130 | US20030138772 SEQ ID NO: 66 |
| AAVA3.4 | 131 | US20030138772 SEQ ID NO: 54 |
| AAVA3.4 | 132 | US20030138772 SEQ ID NO: 68 |
| AAVA3.5 | 133 | US20030138772 SEQ ID NO: 55 |
| AAVA3.5 | 134 | US20030138772 SEQ ID NO: 69 |
| AAVA3.7 | 135 | US20030138772 SEQ ID NO: 56 |
| AAVA3.7 | 136 | US20030138772 SEQ ID NO: 67 |
| AAV29.3 (AAVbb.1) | 137 | US20030138772 SEQ ID NO: 11 |
| AAVC2 | 138 | US20030138772 SEQ ID NO: 61 |
| AAVCh.5 | 139 | US20150159173 SEQ ID NO: 46, US20150315612 SEQ ID NO: 234 |
| AAVcy.2 (AAV13.3) | 140 | US20030138772 SEQ ID NO: 15 |
| AAV24.1 | 141 | US20030138772 SEQ ID NO: 101 |
| AAVcy.3 (AAV24.1) | 142 | US20030138772 SEQ ID NO: 16 |
| AAV27.3 | 143 | US20030138772 SEQ ID NO: 104 |
| AAVcy.4 (AAV27.3) | 144 | US20030138772 SEQ ID NO: 17 |
| AAVcy.5 | 145 | US20150315612 SEQ ID NO: 227 |
| AAV7.2 | 146 | US20030138772 SEQ ID NO: 103 |
| AAVcy.5 (AAV7.2) | 147 | US20030138772 SEQ ID NO: 18 |
| AAV16.3 | 148 | US20030138772 SEQ ID NO: 105 |
| AAVcy.6 (AAV16.3) | 149 | US20030138772 SEQ ID NO: 10 |
| AAVcy.5 | 150 | US20150159173 SEQ ID NO: 8 |
| AAVcy.5 | 151 | US20150159173 SEQ ID NO: 24 |
| AAVCy.5R1 | 152 | US20150159173 |
| AAVCy.5R2 | 153 | US20150159173 |
| AAVCy.5R3 | 154 | US20150159173 |
| AAVCy.5R4 | 155 | US20150159173 |
| AAVDJ | 156 | US20140359799 SEQ ID NO: 3, U.S. Pat. No. 7,588,772 SEQ ID NO: 2 |
| AAVDJ | 157 | US20140359799 SEQ ID NO: 2, U.S. Pat. No. 7,588,772 SEQ ID NO: 1 |
| AAVDJ-8 | 158 | U.S. Pat. No. 7,588,772; Grimm et al 2008 |
| AAVDJ-8 | 159 | U.S. Pat. No. 7,588,772; Grimm et al 2008 |
| AAVF5 | 160 | US20030138772 SEQ ID NO: 110 |
| AAVH2 | 161 | US20030138772 SEQ ID NO: 26 |
| AAVH6 | 162 | US20030138772 SEQ ID NO: 25 |
| AAVhE1.1 | 163 | U.S. Pat. No. 9,233,131 SEQ ID NO: 44 |
| AAVhEr1.14 | 164 | U.S. Pat. No. 9,233,131 SEQ ID NO: 46 |
| AAVhEr1.16 | 165 | U.S. Pat. No. 9,233,131 SEQ ID NO: 48 |
| AAVhEr1.18 | 166 | U.S. Pat. No. 9,233,131 SEQ ID NO: 49 |
| AAVhEr1.23 | 167 | U.S. Pat. No. 9,233,131 SEQ ID NO: 53 |
| (AAVhEr2.29) | | |
| AAVhEr1.35 | 168 | U.S. Pat. No. 9,233,131 SEQ ID NO: 50 |
| AAVhEr1.36 | 169 | U.S. Pat. No. 9,233,131 SEQ ID NO: 52 |
| AAVhEr1.5 | 170 | U.S. Pat. No. 9,233,131 SEQ ID NO: 45 |
| AAVhEr1.7 | 171 | U.S. Pat. No. 9,233,131 SEQ ID NO: 51 |
| AAVhEr1.8 | 172 | U.S. Pat. No. 9,233,131 SEQ ID NO: 47 |
| AAVhEr2.16 | 173 | U.S. Pat. No. 9,233,131 SEQ ID NO: 55 |
| AAVhEr2.30 | 174 | U.S. Pat. No. 9,233,131 SEQ ID NO: 56 |
| AAVhEr2.31 | 175 | U.S. Pat. No. 9,233,131 SEQ ID NO: 58 |
| AAVhEr2.36 | 176 | U.S. Pat. No. 9,233,131 SEQ ID NO: 57 |
| AAVhEr2.4 | 177 | U.S. Pat. No. 9,233,131 SEQ ID NO: 54 |
| AAVhEr3.1 | 178 | U.S. Pat. No. 9,233,131 SEQ ID NO: 59 |
| AAVhu.1 | 179 | US20150315612 SEQ ID NO: 46 |
| AAVhu.1 | 180 | US20150315612 SEQ ID NO: 144 |
| AAVhu.10 | 181 | US20150315612 SEQ ID NO: 56 |
| (AAV16.8) | | |
| AAVhu.10 | 182 | US20150315612 SEQ ID NO: 156 |
| (AAV16.8) | | |
| AAVhu.11 | 183 | US20150315612 SEQ ID NO: 57 |
| (AAV16.12) | | |
| AAVhu.11 | 184 | US20150315612 SEQ ID NO: 153 |
| (AAV16.12) | | |
| AAVhu.12 | 185 | US20150315612 SEQ ID NO: 59 |
| AAVhu.12 | 186 | US20150315612 SEQ ID NO: 154 |
| AAVhu.13 | 187 | US20150159173 SEQ ID NO: 16, US20150315612 SEQ ID NO: 71 |
| AAVhu.13 | 188 | US20150159173 SEQ ID NO: 32, US20150315612 SEQ ID NO: 129 |
| AAVhu.136.1 | 189 | US20150315612 SEQ ID NO: 165 |
| AAVhu.140.1 | 190 | US20150315612 SEQ ID NO: 166 |
| AAVhu.140.2 | 191 | US20150315612 SEQ ID NO: 167 |
| AAVhu.145.6 | 192 | US20150315612 SEQ ID No: 178 |
| AAVhu.15 | 193 | US20150315612 SEQ ID NO: 147 |
| AAVhu.15 | 194 | US20150315612 SEQ ID NO: 50 |
| (AAV33.4) | | |
| AAVhu.156.1 | 195 | US20150315612 SEQ ID No: 179 |
| AAVhu.16 | 196 | US20150315612 SEQ ID NO: 148 |
| AAVhu.16 | 197 | US20150315612 SEQ ID NO: 51 |
| (AAV33.8) | | |
| AAVhu.17 | 198 | US20150315612 SEQ ID NO: 83 |
| AAVhu.17 | 199 | US20150315612 SEQ ID NO: 4 |
| (AAV33.12) | | |
| AAVhu.172.1 | 200 | US20150315612 SEQ ID NO: 171 |
| AAVhu.172.2 | 201 | US20150315612 SEQ ID NO: 172 |
| AAVhu.173.4 | 202 | US20150315612 SEQ ID NO: 173 |
| AAVhu.173.8 | 203 | US20150315612 SEQ ID NO: 175 |
| AAVhu.18 | 204 | US20150315612 SEQ ID NO: 52 |
| AAVhu.18 | 205 | US20150315612 SEQ ID NO: 149 |
| AAVhu.19 | 206 | US20150315612 SEQ ID NO: 62 |
| AAVhu.19 | 207 | US20150315612 SEQ ID NO: 133 |
| AAVhu.2 | 208 | US20150315612 SEQ ID NO: 48 |
| AAVhu.2 | 209 | US20150315612 SEQ ID NO: 143 |
| AAVhu.20 | 210 | US20150315612 SEQ ID NO: 63 |
| AAVhu.20 | 211 | US20150315612 SEQ ID NO: 134 |
| AAVhu.21 | 212 | US20150315612 SEQ ID NO: 65 |
| AAVhu.21 | 213 | US20150315612 SEQ ID NO: 135 |
| AAVhu.22 | 214 | US20150315612 SEQ ID NO: 67 |
| AAVhu.22 | 215 | US20150315612 SEQ ID NO: 138 |
| AAVhu.23 | 216 | US20150315612 SEQ ID NO: 60 |
| AAVhu.23.2 | 217 | US20150315612 SEQ ID NO: 137 |
| AAVhu.24 | 218 | US20150315612 SEQ ID NO: 66 |
| AAVhu.24 | 219 | US20150315612 SEQ ID NO: 136 |
| AAVhu.25 | 220 | US20150315612 SEQ ID NO: 49 |
| AAVhu.25 | 221 | US20150315612 SEQ ID NO: 146 |
| AAVhu.26 | 222 | US20150159173 SEQ ID NO: 17, US20150315612 SEQ ID NO: 61 |
| AAVhu.26 | 223 | US20150159173 SEQ ID NO: 33, US20150315612 SEQ ID NO: 139 |
| AAVhu.27 | 224 | US20150315612 SEQ ID NO: 64 |
| AAVhu.27 | 225 | US20150315612 SEQ ID NO: 140 |
| AAVhu.28 | 226 | US20150315612 SEQ ID NO: 68 |
| AAVhu.28 | 227 | US20150315612 SEQ ID NO: 130 |
| AAVhu.29 | 228 | US20150315612 SEQ ID NO: 69 |
| AAVhu.29 | 229 | US20150159173 SEQ ID NO: 42, US20150315612 SEQ ID NO: 132 |
| AAVhu.29 | 230 | US20150315612 SEQ ID NO: 225 |
| AAVhu.29R | 231 | US20150159173 |
| AAVhu.3 | 232 | US20150315612 SEQ ID NO: 44 |
| AAVhu.3 | 233 | US20150315612 SEQ ID NO: 145 |
| AAVhu.30 | 234 | US20150315612 SEQ ID NO: 70 |
| AAVhu.30 | 235 | US20150315612 SEQ ID NO: 131 |
| AAVhu.31 | 236 | US20150315612 SEQ ID NO: 1 |
| AAVhu.31 | 237 | US20150315612 SEQ ID NO: 121 |
| AAVhu.32 | 238 | US20150315612 SEQ ID NO: 2 |
| AAVhu.32 | 239 | US20150315612 SEQ ID NO: 122 |
| AAVhu.33 | 240 | US20150315612 SEQ ID NO: 75 |
| AAVhu.33 | 241 | US20150315612 SEQ ID NO: 124 |
| AAVhu.34 | 242 | US20150315612 SEQ ID NO: 72 |
| AAVhu.34 | 243 | US20150315612 SEQ ID NO: 125 |
| AAVhu.35 | 244 | US20150315612 SEQ ID NO: 73 |
| AAVhu.35 | 245 | US20150315612 SEQ ID NO: 164 |
| AAVhu.36 | 246 | US20150315612 SEQ ID NO: 74 |
| AAVhu.36 | 247 | US20150315612 SEQ ID NO: 126 |
| AAVhu.37 | 248 | US20150159173 SEQ ID NO: 34, US20150315612 SEQ ID NO: 88 |
| AAVhu.37 | 249 | US20150315612 SEQ ID NO: 10, US20150159173 SEQ ID NO: 18 |
| (AAV106.1) | | |
| AAVhu.38 | 250 | US20150315612 SEQ ID NO: 161 |
| AAVhu.39 | 251 | US20150315612 SEQ ID NO: 102 |
| AAVhu.39 | 252 | US20150315612 SEQ ID NO: 24 |
| (AAVLG-9) | | |
| AAVhu.4 | 253 | US20150315612 SEQ ID NO: 47 |
| AAVhu.4 | 254 | US20150315612 SEQ ID NO: 141 |
| AAVhu.40 | 255 | US20150315612 SEQ ID NO: 87 |
| AAVhu.40 | 256 | US20150315612 SEQ ID No: 11 |
| (AAV114.3) | | |
| AAVhu.41 | 257 | US20150315612 SEQ ID NO: 91 |
| AAVhu.41 | 258 | US20150315612 SEQ ID NO: 6 |
| (AAV127.2) | | |
| AAVhu.42 | 259 | US20150315612 SEQ ID NO: 85 |
| AAVhu.42 | 260 | US20150315612 SEQ ID NO: 8 |
| (AAV127.5) | | |
| AAVhu.43 | 261 | US20150315612 SEQ ID NO: 160 |
| AAVhu.43 | 262 | US20150315612 SEQ ID NO: 236 |
| AAVhu.43 | 263 | US20150315612 SEQ ID NO: 80 |
| (AAV128.1) | | |
| AAVhu.44 | 264 | US20150159173 SEQ ID NO: 45, US20150315612 SEQ ID NO: 158 |
| AAVhu.44 | 265 | US20150315612 SEQ ID NO: 81 |
| (AAV128.3) | | |
| AAVhu.44R1 | 266 | US20150159173 |
| AAVhu.44R2 | 267 | US20150159173 |
| AAVhu.44R3 | 268 | US20150159173 |
| AAVhu.45 | 269 | US20150315612 SEQ ID NO: 76 |
| AAVhu.45 | 270 | US20150315612 SEQ ID NO: 127 |
| AAVhu.46 | 271 | US20150315612 SEQ ID NO: 82 |
| AAVhu.46 | 272 | US20150315612 SEQ ID NO: 159 |
| AAVhu.46 | 273 | US20150315612 SEQ ID NO: 224 |
| AAVhu.47 | 274 | US20150315612 SEQ ID NO: 77 |
| AAVhu.47 | 275 | US20150315612 SEQ ID NO: 128 |
| AAVhu.48 | 276 | US20150159173 SEQ ID NO: 38 |
| AAVhu.48 | 277 | US20150315612 SEQ ID NO: 157 |
| AAVhu.48 | 278 | US20150315612 SEQ ID NO: 78 |
| (AAV130.4) | | |
| AAVhu.48R1 | 279 | US20150159173 |
| AAVhu.48R2 | 280 | US20150159173 |
| AAVhu.48R3 | 281 | US20150159173 |
| AAVhu.49 | 282 | US20150315612 SEQ ID NO: 209 |
| AAVhu.49 | 283 | US20150315612 SEQ ID NO: 189 |
| AAVhu.5 | 284 | US20150315612 SEQ ID NO: 45 |
| AAVhu.5 | 285 | US20150315612 SEQ ID NO: 142 |
| AAVhu.51 | 286 | US20150315612 SEQ ID NO: 208 |
| AAVhu.51 | 287 | US20150315612 SEQ ID NO: 190 |
| AAVhu.52 | 288 | US20150315612 SEQ ID NO: 210 |
| AAVhu.52 | 289 | US20150315612 SEQ ID NO: 191 |
| AAVhu.53 | 290 | US20150159173 SEQ ID NO: 19 |
| AAVhu.53 | 291 | US20150159173 SEQ ID NO: 35 |
| AAVhu.53 | 292 | US20150315612 SEQ ID NO: 176 |
| (AAV145.1) | | |
| AAVhu.54 | 293 | US20150315612 SEQ ID NO: 188 |
| AAVhu.54 | 294 | US20150315612 SEQ ID No: 177 |
| (AAV145.5) | | |
| AAVhu.55 | 295 | US20150315612 SEQ ID NO: 187 |
| AAVhu.56 | 296 | US20150315612 SEQ ID NO: 205 |
| AAVhu.56 | 297 | US20150315612 SEQ ID NO: 168 |
| (AAV145.6) | | |
| AAVhu.56 | 298 | US20150315612 SEQ ID NO: 192 |
| (AAV145.6) | | |
| AAVhu.57 | 299 | US20150315612 SEQ ID NO: 206 |
| AAVhu.57 | 300 | US20150315612 SEQ ID NO: 169 |
| AAVhu.57 | 301 | US20150315612 SEQ ID NO: 193 |
| AAVhu.58 | 302 | US20150315612 SEQ ID NO: 207 |
| AAVhu.58 | 303 | US20150315612 SEQ ID NO: 194 |
| AAVhu.6 (AAV3.1) | 304 | US20150315612 SEQ ID NO: 5 |
| AAVhu.6 (AAV3.1) | 305 | US20150315612 SEQ ID NO: 84 |
| AAVhu.60 | 306 | US20150315612 SEQ ID NO: 184 |
| AAVhu.60 | 307 | US20150315612 SEQ ID NO: 170 |
| (AAV161.10) | | |
| AAVhu.61 | 308 | US20150315612 SEQ ID NO: 185 |
| AAVhu.61 | 309 | US20150315612 SEQ ID NO: 174 |
| (AAV161.6) | | |
| AAVhu.63 | 310 | US20150315612 SEQ ID NO: 204 |
| AAVhu.63 | 311 | US20150315612 SEQ ID NO: 195 |
| AAVhu.64 | 312 | US20150315612 SEQ ID NO: 212 |
| AAVhu.64 | 313 | US20150315612 SEQ ID NO: 196 |
| AAVhu.66 | 314 | US20150315612 SEQ ID NO: 197 |
| AAVhu.67 | 315 | US20150315612 SEQ ID NO: 215 |
| AAVhu.67 | 316 | US20150315612 SEQ ID NO: 198 |
| AAVhu.7 | 317 | US20150315612 SEQ ID NO: 226 |
| AAVhu.7 | 318 | US20150315612 SEQ ID NO: 150 |
| AAVhu.7 (AAV7.3) | 319 | US20150315612 SEQ ID NO: 55 |
| AAVhu.71 | 320 | US20150315612 SEQ ID NO: 79 |
| AAVhu.8 | 321 | US20150315612 SEQ ID NO: 53 |
| AAVhu.8 | 322 | US20150315612 SEQ ID NO: 12 |
| AAVhu.8 | 323 | US20150315612 SEQ ID NO: 151 |
| AAVhu.9 (AAV3.1) | 324 | US20150315612 SEQ ID NO: 58 |
| AAVhu.9 (AAV3.1) | 325 | US20150315612 SEQ ID NO: 155 |
| AAV-LK01 | 326 | US20150376607 SEQ ID NO: 2 |
| AAV-LK01 | 327 | US20150376607 SEQ ID NO: 29 |
| AAV-LK02 | 328 | US20150376607 SEQ ID NO: 3 |
| AAV-LK02 | 329 | US20150376607 SEQ ID NO: 30 |
| AAV-LK03 | 330 | US20150376607 SEQ ID NO: 4 |
| AAV-LK03 | 331 | WO2015121501 SEQ ID NO: 12, US20150376607 SEQ ID NO: 31 |
| AAV-LK04 | 332 | US20150376607 SEQ ID NO: 5 |
| AAV-LK04 | 333 | US20150376607 SEQ ID NO: 32 |
| AAV-LK05 | 334 | US20150376607 SEQ ID NO: 6 |
| AAV-LK05 | 335 | US20150376607 SEQ ID NO: 33 |
| AAV-LK06 | 336 | US20150376607 SEQ ID NO: 7 |
| AAV-LK06 | 337 | US20150376607 SEQ ID NO: 34 |
| AAV-LK07 | 338 | US20150376607 SEQ ID NO: 8 |
| AAV-LK07 | 339 | US20150376607 SEQ ID NO: 35 |
| AAV-LK08 | 340 | US20150376607 SEQ ID NO: 9 |
| AAV-LK08 | 341 | US20150376607 SEQ ID NO: 36 |
| AAV-LK09 | 342 | US20150376607 SEQ ID NO: 10 |
| AAV-LK09 | 343 | US20150376607 SEQ ID NO: 37 |
| AAV-LK10 | 344 | US20150376607 SEQ ID NO: 11 |
| AAV-LK10 | 345 | US20150376607 SEQ ID NO: 38 |
| AAV-LK11 | 346 | US20150376607 SEQ ID NO: 12 |
| AAV-LK11 | 347 | US20150376607 SEQ ID NO: 39 |
| AAV-LK12 | 348 | US20150376607 SEQ ID NO: 13 |
| AAV-LK12 | 349 | US20150376607 SEQ ID NO: 40 |
| AAV-LK13 | 350 | US20150376607 SEQ ID NO: 14 |
| AAV-LK13 | 351 | US20150376607 SEQ ID NO: 41 |
| AAV-LK14 | 352 | US20150376607 SEQ ID NO: 15 |
| AAV-LK14 | 353 | US20150376607 SEQ ID NO: 42 |
| AAV-LK15 | 354 | US20150376607 SEQ ID NO: 16 |
| AAV-LK15 | 355 | US20150376607 SEQ ID NO: 43 |
| AAV-LK16 | 356 | US20150376607 SEQ ID NO: 17 |
| AAV-LK16 | 357 | US20150376607 SEQ ID NO: 44 |
| AAV-LK17 | 358 | US20150376607 SEQ ID NO: 18 |
| AAV-LK17 | 359 | US20150376607 SEQ ID NO: 45 |
| AAV-LK18 | 360 | US20150376607 SEQ ID NO: 19 |
| AAV-LK18 | 361 | US20150376607 SEQ ID NO: 46 |
| AAV-LK19 | 362 | US20150376607 SEQ ID NO: 20 |
| AAV-LK19 | 363 | US20150376607 SEQ ID NO: 47 |
| AAV-PAEC | 364 | US20150376607 SEQ ID NO: 1 |
| AAV-PAEC | 365 | US20150376607 SEQ ID NO: 48 |
| AAV-PAEC11 | 366 | US20150376607 SEQ ID NO: 26 |
| AAV-PAEC11 | 367 | US20150376607 SEQ ID NO: 54 |
| AAV-PAEC12 | 368 | US20150376607 SEQ ID NO: 27 |
| AAV-PAEC12 | 369 | US20150376607 SEQ ID NO: 51 |
| AAV-PAEC13 | 370 | US20150376607 SEQ ID NO: 28 |
| AAV-PAEC13 | 371 | US20150376607 SEQ ID NO: 49 |
| AAV-PAEC2 | 372 | US20150376607 SEQ ID NO: 21 |
| AAV-PAEC2 | 373 | US20150376607 SEQ ID NO: 56 |
| AAV-PAEC4 | 374 | US20150376607 SEQ ID NO: 22 |
| AAV-PAEC4 | 375 | US20150376607 SEQ ID NO: 55 |
| AAV-PAEC6 | 376 | US20150376607 SEQ ID NO: 23 |
| AAV-PAEC6 | 377 | US20150376607 SEQ ID NO: 52 |
| AAV-PAEC7 | 378 | US20150376607 SEQ ID NO: 24 |
| AAV-PAEC7 | 379 | US20150376607 SEQ ID NO: 53 |
| AAV-PAEC8 | 380 | US20150376607 SEQ ID NO: 25 |
| AAV-PAEC8 | 381 | US20150376607 SEQ ID NO: 50 |
| AAVpi.1 | 382 | US20150315612 SEQ ID NO: 28 |
| AAVpi.1 | 383 | US20150315612 SEQ ID NO: 93 |
| AAVpi.2 | 384 | US20150315612 SEQ ID NO: 30 |
| AAVpi.2 | 385 | US20150315612 SEQ ID NO: 95 |
| AAVpi.3 | 386 | US20150315612 SEQ ID NO: 29 |
| AAVpi.3 | 387 | US20150315612 SEQ ID NO: 94 |
| AAVrh.10 | 388 | US20150159173 SEQ ID NO: 9 |
| AAVrh.10 | 389 | US20150159173 SEQ ID NO: 25 |
| AAV44.2 | 390 | US20030138772 SEQ ID NO: 59 |
| AAVrh.10 | 391 | US20030138772 SEQ ID NO: 81 |
| (AAV44.2) | | |
| AAV42.1B | 392 | US20030138772 SEQ ID NO: 90 |
| AAVrh.12 | 393 | US20030138772 SEQ ID NO: 30 |
| (AAV42.1b) | | |
| AAVrh.13 | 394 | US20150159173 SEQ ID NO: 10 |
| AAVrh.13 | 395 | US20150159173 SEQ ID NO: 26 |
| AAVrh.13 | 396 | US20150315612 SEQ ID NO: 228 |
| AAVrh.13R | 397 | US20150159173 |
| AAV42.3A | 398 | US20030138772 SEQ ID NO: 87 |
| AAVrh.14 | 399 | US20030138772 SEQ ID NO: 32 |
| (AAV42.3a) | | |
| AAV42.5A | 400 | US20030138772 SEQ ID NO: 89 |
| AAVrh.17 | 401 | US20030138772 SEQ ID NO: 34 |
| (AAV42.5a) | | |
| AAV42.5B | 402 | US20030138772 SEQ ID NO: 91 |
| AAVrh.18 | 403 | US20030138772 SEQ ID NO: 29 |
| (AAV42.5b) | | |
| AAV42.6B | 404 | US20030138772 SEQ ID NO: 112 |
| AAVrh.19 | 405 | US20030138772 SEQ ID NO: 38 |
| (AAV42.6b) | | |
| AAVrh.2 | 406 | US20150159173 SEQ ID NO: 39 |
| AAVrh.2 | 407 | US20150315612 SEQ ID NO: 231 |
| AAVrh.20 | 408 | US20150159173 SEQ ID NO: 1 |
| AAV42.10 | 409 | US20030138772 SEQ ID NO: 106 |
| AAVrh.21 | 410 | US20030138772 SEQ ID NO: 35 |
| (AAV42.10) | | |
| AAV42.11 | 411 | US20030138772 SEQ ID NO: 108 |
| AAVrh.22 | 412 | US20030138772 SEQ ID NO: 37 |
| (AAV42.11) | | |
| AAV42.12 | 413 | US20030138772 SEQ ID NO: 113 |
| AAVrh.23 | 414 | US20030138772 SEQ ID NO: 58 |
| (AAV42.12) | | |
| AAV42.13 | 415 | US20030138772 SEQ ID NO: 86 |
| AAVrh.24 | 416 | US20030138772 SEQ ID NO: 31 |
| (AAV42.13) | | |
| AAV42.15 | 417 | US20030138772 SEQ ID NO: 84 |
| AAVrh.25 | 418 | US20030138772 SEQ ID NO: 28 |
| (AAV42.15) | | |
| AAVrh.2R | 419 | US20150159173 |
| AAVrh.31 | 420 | US20030138772 SEQ ID NO: 48 |
| (AAV223.1) | | |
| AAVC1 | 421 | US20030138772 SEQ ID NO: 60 |
| AAVrh.32 (AAVC1) | 422 | US20030138772 SEQ ID NO: 19 |
| AAVrh.32/33 | 423 | US20150159173 SEQ ID NO: 2 |
| AAVrh.33 (AAVC3) | 424 | US20030138772 SEQ ID NO: 20 |
| AAVC5 | 425 | US20030138772 SEQ ID NO: 62 |
| AAVrh.34 (AAVC5) | 426 | US20030138772 SEQ ID NO: 21 |
| AAVF1 | 427 | US20030138772 SEQ ID NO: 109 |
| AAVrh.35 (AAVF1) | 428 | US20030138772 SEQ ID NO: 22 |
| AAVF3 | 429 | US20030138772 SEQ ID NO: 111 |
| AAVrh.36 (AAVF3) | 430 | US20030138772 SEQ ID NO: 23 |
| AAVrh.37 | 431 | US20030138772 SEQ ID NO: 24 |
| AAVrh.37 | 432 | US20150159173 SEQ ID NO: 40 |
| AAVrh.37 | 433 | US20150315612 SEQ ID NO: 229 |
| AAVrh.37R2 | 434 | US20150159173 |
| AAVrh.38 (AAVLG- | 435 | US20150315612 SEQ ID NO: 7 |
| 4) | | |
| AAVrh.38 (AAVLG- | 436 | US20150315612 SEQ ID NO: 86 |
| 4) | | |
| AAVrh.39 | 437 | US20150159173 SEQ ID NO: 20, US20150315612 SEQ ID NO: 13 |
| AAVrh.39 | 438 | US20150159173 SEQ ID NO: 3, US20150159173 SEQ ID NO: 36, |
| | | US20150315612 SEQ ID NO: 89 |
| AAVrh.40 | 439 | US20150315612 SEQ ID NO: 92 |
| AAVrh.40 (AAVLG- | 440 | US20150315612 SEQ ID No: 14 |
| 10) | | |
| AAVrh.43 | 441 | US20150315612 SEQ ID NO: 43, US20150159173 SEQ ID NO: 21 |
| (AAVN721-8) | | |
| AAVrh.43 | 442 | US20150315612 SEQ ID NO: 163, US20150159173 SEQ ID NO: 37 |
| (AAVN721-8) | | |
| AAVrh.44 | 443 | US20150315612 SEQ ID NO: 34 |
| AAVrh.44 | 444 | US20150315612 SEQ ID NO: 111 |
| AAVrh.45 | 445 | US20150315612 SEQ ID NO: 41 |
| AAVrh.45 | 446 | US20150315612 SEQ ID NO: 109 |
| AAVrh.46 | 447 | US20150159173 SEQ ID NO: 22, US20150315612 SEQ ID NO: 19 |
| AAVrh.46 | 448 | US20150159173 SEQ ID NO: 4, US20150315612 SEQ ID NO: 101 |
| AAVrh.47 | 449 | US20150315612 SEQ ID NO: 38 |
| AAVrh.47 | 450 | US20150315612 SEQ ID NO: 118 |
| AAVrh.48 | 451 | US20150159173 SEQ ID NO: 44, US20150315612 SEQ ID NO: 115 |
| AAVrh.48.1 | 452 | US20150159173 |
| AAVrh.48.1.2 | 453 | US20150159173 |
| AAVrh.48.2 | 454 | US20150159173 |
| AAVrh.48 (AAV1-7) | 455 | US20150315612 SEQ ID NO: 32 |
| AAVrh.49 (AAV1-8) | 456 | US20150315612 SEQ ID NO: 25 |
| AAVrh.49 (AAV1-8) | 457 | US20150315612 SEQ ID NO: 103 |
| AAVrh.50 (AAV2-4) | 458 | US20150315612 SEQ ID NO: 23 |
| AAVrh.50 (AAV2-4) | 459 | US20150315612 SEQ ID NO: 108 |
| AAVrh.51 (AAV2-5) | 460 | US20150315612 SEQ ID No: 22 |
| AAVrh.51 (AAV2-5) | 461 | US20150315612 SEQ ID NO: 104 |
| AAVrh.52 (AAV3-9) | 462 | US20150315612 SEQ ID NO: 18 |
| AAVrh.52 (AAV3-9) | 463 | US20150315612 SEQ ID NO: 96 |
| AAVrh.53 | 464 | US20150315612 SEQ ID NO: 97 |
| AAVrh.53 (AAV3- | 465 | US20150315612 SEQ ID NO: 17 |
| 11) | | |
| AAVrh.53 (AAV3- | 466 | US20150315612 SEQ ID NO: 186 |
| 11) | | |
| AAVrh.54 | 467 | US20150315612 SEQ ID NO: 40 |
| AAVrh.54 | 468 | US20150159173 SEQ ID NO: 49, US20150315612 SEQ ID NO: 116 |
| AAVrh.55 | 469 | US20150315612 SEQ ID NO: 37 |
| AAVrh.55 (AAV4- | 470 | US20150315612 SEQ ID NO: 117 |
| 19) | | |
| AAVrh.56 | 471 | US20150315612 SEQ ID NO: 54 |
| AAVrh.56 | 472 | US20150315612 SEQ ID NO: 152 |
| AAVrh.57 | 473 | US20150315612 SEQ ID NO: 26 |
| AAVrh.57 | 474 | US20150315612 SEQ ID NO: 105 |
| AAVrh.58 | 475 | US20150315612 SEQ ID NO: 27 |
| AAVrh.58 | 476 | US20150159173 SEQ ID NO: 48, US20150315612 SEQ ID NO: 106 |
| AAVrh.58 | 477 | US20150315612 SEQ ID NO: 232 |
| AAVrh.59 | 478 | US20150315612 SEQ ID NO: 42 |
| AAVrh.59 | 479 | US20150315612 SEQ ID NO: 110 |
| AAVrh.60 | 480 | US20150315612 SEQ ID NO: 31 |
| AAVrh.60 | 481 | US20150315612 SEQ ID NO: 120 |
| AAVrh.61 | 482 | US20150315612 SEQ ID NO: 107 |
| AAVrh.61 (AAV2-3) | 483 | US20150315612 SEQ ID NO: 21 |
| AAVrh.62 (AAV2- | 484 | US20150315612 SEQ ID No: 33 |
| 15) | | |
| AAVrh.62 (AAV2- | 485 | US20150315612 SEQ ID NO: 114 |
| 15) | | |
| AAVrh.64 | 486 | US20150315612 SEQ ID No: 15 |
| AAVrh.64 | 487 | US20150159173 SEQ ID NO: 43, US20150315612 SEQ ID NO: 99 |
| AAVrh.64 | 488 | US20150315612 SEQ ID NO: 233 |
| AAVRh.64R1 | 489 | US20150159173 |
| AAVRh.64R2 | 490 | US20150159173 |
| AAVrh.65 | 491 | US20150315612 SEQ ID NO: 35 |
| AAVrh.65 | 492 | US20150315612 SEQ ID NO: 112 |
| AAVrh.67 | 493 | US20150315612 SEQ ID NO: 36 |
| AAVrh.67 | 494 | US20150315612 SEQ ID NO: 230 |
| AAVrh.67 | 495 | US20150159173 SEQ ID NO: 47, US20150315612 SEQ ID NO: 113 |
| AAVrh.68 | 496 | US20150315612 SEQ ID NO: 16 |
| AAVrh.68 | 497 | US20150315612 SEQ ID NO: 100 |
| AAVrh.69 | 498 | US20150315612 SEQ ID NO: 39 |
| AAVrh.69 | 499 | US20150315612 SEQ ID NO: 119 |
| AAVrh.70 | 500 | US20150315612 SEQ ID NO: 20 |
| AAVrh.70 | 501 | US20150315612 SEQ ID NO: 98 |
| AAVrh.71 | 502 | US20150315612 SEQ ID NO: 162 |
| AAVrh.72 | 503 | US20150315612 SEQ ID NO: 9 |
| AAVrh.73 | 504 | US20150159173 SEQ ID NO: 5 |
| AAVrh.74 | 505 | US20150159173 SEQ ID NO: 6 |
| AAVrh.8 | 506 | US20150159173 SEQ ID NO: 41 |
| AAVrh.8 | 507 | US20150315612 SEQ ID NO: 235 |
| AAVrh.8R | 508 | US20150159173, WO2015168666 SEQ ID NO: 9 |
| AAVrh.8R A586R | 509 | WO2015168666 SEQ ID NO: 10 |
| mutant | | |
| AAVrh.8R R533A | 510 | WO2015168666 SEQ ID NO: 11 |
| mutant | | |
| BAAV (bovine | 511 | U.S. Pat. No. 9,193,769 SEQ ID NO: 8 |
| AAV) | | |
| BAAV (bovine | 512 | U.S. Pat. No. 9,193,769 SEQ ID NO: 10 |
| AAV) | | |
| BAAV (bovine | 513 | U.S. Pat. No. 9,193,769 SEQ ID NO: 4 |
| AAV) | | |
| BAAV (bovine | 514 | U.S. Pat. No. 9,193,769 SEQ ID NO: 2 |
| AAV) | | |
| BAAV (bovine | 515 | U.S. Pat. No. 9,193,769 SEQ ID NO: 6 |
| AAV) | | |
| BAAV (bovine | 516 | U.S. Pat. No. 9,193,769 SEQ ID NO: 1 |
| AAV) | | |
| BAAV (bovine | 517 | U.S. Pat. No. 9,193,769 SEQ ID NO: 5 |
| AAV) | | |
| BAAV (bovine | 518 | U.S. Pat. No. 9,193,769 SEQ ID NO: 3 |
| AAV) | | |
| BAAV (bovine | 519 | U.S. Pat. No. 9,193,769 SEQ ID NO: 11 |
| AAV) | | |
| BAAV (bovine | 520 | U.S. Pat. No. 7,427,396 SEQ ID NO: 5 |
| AAV) | | |
| BAAV (bovine | 521 | U.S. Pat. No. 7,427,396 SEQ ID NO: 6 |
| AAV) | | |
| BAAV (bovine | 522 | U.S. Pat. No. 9,193,769 SEQ ID NO: 7 |
| AAV) | | |
| BAAV (bovine | 523 | U.S. Pat. No. 9,193,769 SEQ ID NO: 9 |
| AAV) | | |
| BNP61 AAV | 524 | US20150238550 SEQ ID NO: 1 |
| BNP61 AAV | 525 | US20150238550 SEQ ID NO: 2 |
| BNP62 AAV | 526 | US20150238550 SEQ ID NO: 3 |
| BNP63 AAV | 527 | US20150238550 SEQ ID NO: 4 |
| caprine AAV | 528 | U.S. Pat. No. 7,427,396 SEQ ID NO: 3 |
| caprine AAV | 529 | U.S. Pat. No. 7,427,396 SEQ ID NO: 4 |
| true type AAV | 530 | WO2015121501 SEQ ID NO: 2 |
| (ttAAV) | | |
| AAAV (Avian AAV) | 531 | U.S. Pat. No. 9,238,800 SEQ ID NO: 12 |
| AAAV (Avian AAV) | 532 | U.S. Pat. No. 9,238,800 SEQ ID NO: 2 |
| AAAV (Avian AAV) | 533 | U.S. Pat. No. 9,238,800 SEQ ID NO: 6 |
| AAAV (Avian AAV) | 534 | U.S. Pat. No. 9,238,800 SEQ ID NO: 4 |
| AAAV (Avian AAV) | 535 | U.S. Pat. No. 9,238,800 SEQ ID NO: 8 |
| AAAV (Avian AAV) | 536 | U.S. Pat. No. 9,238,800 SEQ ID NO: 14 |
| AAAV (Avian AAV) | 537 | U.S. Pat. No. 9,238,800 SEQ ID NO: 10 |
| AAAV (Avian AAV) | 538 | U.S. Pat. No. 9,238,800 SEQ ID NO: 15 |
| AAAV (Avian AAV) | 539 | U.S. Pat. No. 9,238,800 SEQ ID NO: 5 |
| AAAV (Avian AAV) | 540 | U.S. Pat. No. 9,238,800 SEQ ID NO: 9 |
| AAAV (Avian AAV) | 541 | U.S. Pat. No. 9,238,800 SEQ ID NO: 3 |
| AAAV (Avian AAV) | 542 | U.S. Pat. No. 9,238,800 SEQ ID NO: 7 |
| AAAV (Avian AAV) | 543 | U.S. Pat. No. 9,238,800 SEQ ID NO: 11 |
| AAAV (Avian AAV) | 544 | U.S. Pat. No. 9,238,800 SEQ ID NO: 13 |
| AAAV (Avian AAV) | 545 | U.S. Pat. No. 9,238,800 SEQ ID NO: 1 |
| AAV Shuffle 100-1 | 546 | US20160017295 SEQ ID NO: 23 |
| AAV Shuffle 100-1 | 547 | US20160017295 SEQ ID NO: 11 |
| AAV Shuffle 100-2 | 548 | US20160017295 SEQ ID NO: 37 |
| AAV Shuffle 100-2 | 549 | US20160017295 SEQ ID NO: 29 |
| AAV Shuffle 100-3 | 550 | US20160017295 SEQ ID NO: 24 |
| AAV Shuffle 100-3 | 551 | US20160017295 SEQ ID NO: 12 |
| AAV Shuffle 100-7 | 552 | US20160017295 SEQ ID NO: 25 |
| AAV Shuffle 100-7 | 553 | US20160017295 SEQ ID NO: 13 |
| AAV Shuffle 10-2 | 554 | US20160017295 SEQ ID NO: 34 |
| AAV Shuffle 10-2 | 555 | US20160017295 SEQ ID NO: 26 |
| AAV Shuffle 10-6 | 556 | US20160017295 SEQ ID NO: 35 |
| AAV Shuffle 10-6 | 557 | US20160017295 SEQ ID NO: 27 |
| AAV Shuffle 10-8 | 558 | US20160017295 SEQ ID NO: 36 |
| AAV Shuffle 10-8 | 559 | US20160017295 SEQ ID NO: 28 |
| AAV SM 100-10 | 560 | US20160017295 SEQ ID NO: 41 |
| AAV SM 100-10 | 561 | US20160017295 SEQ ID NO: 33 |
| AAV SM 100-3 | 562 | US20160017295 SEQ ID NO: 40 |
| AAV SM 100-3 | 563 | US20160017295 SEQ ID NO: 32 |
| AAV SM 10-1 | 564 | US20160017295 SEQ ID NO: 38 |
| AAV SM 10-1 | 565 | US20160017295 SEQ ID NO: 30 |
| AAV SM 10-2 | 566 | US20160017295 SEQ ID NO: 10 |
| AAV SM 10-2 | 567 | US20160017295 SEQ ID NO: 22 |
| AAV SM 10-8 | 568 | US20160017295 SEQ ID NO: 39 |
| AAV SM 10-8 | 569 | US20160017295 SEQ ID NO: 31 |

[0146] Each of the patents, applications and/or publications listed in Table 3 are hereby incorporated by reference in their entirety.

[0147] In one embodiment, the AAV serotype may be engineered to comprise at least one AAV capsid CD8+ T-cell epitope. Hui et al. (Molecular Therapy—Methods & Clinical Development (2015) 2, 15029 doi:10.1038/mtm.2015.29; the contents of which are herein incorporated by reference in its entirety) identified AAV capsid-specific CD8+ T-cell epitopes for AAV1 and AAV2 (see e.g., Table 2 in the publication). As a non-limiting example, the capsid-specific CD8+ T-cell epitope may be for an AAV2 serotype. As a non-limiting example, the capsid-specific CD8+ T-cell epitope may be for an AAV1 serotype.

[0148] In one embodiment, peptides for inclusion in an AAV serotype may be identified using the methods described by Hui et al. (Molecular Therapy—Methods & Clinical Development (2015) 2, 15029 doi:10.1038/mtm.2015.29; the contents of which are herein incorporated by reference in its entirety). As a non-limiting example, the procedure includes isolating human splenocytes, restimulating the splenocytes in vitro using individual peptides spanning the amino acid sequence of the AAV capsid protein, IFN-gamma ELISpot with the individual peptides used for the in vitro restimulation, bioinformatics analysis to determine the HLA restriction of 15-mers identified by IFN-gamma ELISpot, identification of candidate reactive 9-mer epitopes for a given HLA allele, synthesis candidate 9-mers, second IFN-gamma ELISpot screening of splenocytes from subjects carrying the HLA alleles to which identified AAV epitopes are predicted to bind, determine the AAV capsid-reactive CD8+ T cell epitopes and determine the frequency of subjects reacting to a given AAV epitope.

[0149] In one embodiment, peptides for inclusion in an AAV serotype may be identified by isolating human splenocytes, restimulating the splenocytes in vitro using individual peptides spanning the amino acid sequence of the AAV capsid protein, IFN-gamma ELISpot with the individual peptides used for the in vitro restimulation, bioinformatics analysis to determine the given allele restriction of 15-mers identified by IFN-gamma ELISpot, identification of candidate reactive 9-mer epitopes for a given allele, synthesis candidate 9-mers, second IFN-gamma ELISpot screening of splenocytes from subjects carrying the specific alleles to which identified AAV epitopes are predicted to bind, determine the AAV capsid-reactive CD8+ T cell epitopes and determine the frequency of subjects reacting to a given AAV epitope.

[0150] AAV vectors comprising the nucleic acid sequence for the siRNA molecules may be prepared or derived from various serotypes of AAVs, including, but not limited to, AAV1, AAV2, AAV3, AAV4, AAV5, AAV6, AAV7, AAV8, AAV9, AAV9.47, AAV9(hu14), AAV10, AAV11, AAV12, AAVrh8, AAVrh10, AAV-DJ8 and AAV-DJ. In some cases, different serotypes of AAVs may be mixed together or with other types of viruses to produce chimeric AAV vectors. As a non-limiting example, the AAV vector is derived from the AAV9 serotype.

[0151] In one embodiment, AAV particles of the present invention may comprise capsid proteins having sequences of SEQ ID NOs: 1 and 3, which have increased tropism to the brain, of International Publication No. WO2014160092, the content of which is incorporated herein by reference in its entirety.

[0152] In one embodiment, AAV particles of the present invention may comprise capsid proteins which may target to oligodendrocytes in the central nervous system. The capsid proteins may comprise AAV capsid coding sequence of SEQ ID NO: 1 or AAV capsid proteins comprising amino acid sequences of SEQ ID NOs: 2 to 4 of International Publication No. WO2014052789, the content of which is herein incorporated by reference in its entirety.

[0153] In one embodiment, AAV particles of the present invention may comprise capsid proteins having increased capacity to cross the blood-brain barrier in CNS as disclosed in U.S. Pat. No. 8,927,514, the content of which is incorporated herein by reference in its entirety. The amino acid sequences and nucleic acid sequences of such capsid proteins may include, but are not limited to, SEQ ID NOs: 2-17 and SEQ ID NOs: 25-33, respectively, of U.S. Pat. No. 8,927,514.

[0154] In some embodiments, AAV particles of the present invention may comprise AAV2 capsid proteins or variants thereof. AAV particles with AAV2 capsid proteins have been shown to deliver genes to neurons effectively in the brain, retina and spinal cord. In one embodiment, AAV2 capsid proteins may be further modified such as addition of a targeting peptide to the capsid proteins that targets an AAV particle to brain vascular endothelium as disclosed in U.S. Pat. Nos. 6,691,948 and 8,299,215, the contents of each of which are herein incorporated by reference in their entirety. Such AAV particles may be used to deliver a functional payload of interest to treat a brain disease such as mucopolysaccharide (MPS).

[0155] In some embodiments, AAV particles of the present invention may comprise AAV5 capsid proteins or variants thereof. AAV particles with AAV5 capsid proteins can transduce neurons in various regions of the CNS, including the cortex, the hippocampus (HPC), cerebellum, substantia nigra (SN), striatum, globus pallidus, and spinal cord (Burger C et al., Mol Ther., 2004, 10(2): 302-317; Liu G et al., Mol Ther. 2007, 15(2): 242-247; and Colle M et al., Hum, Mol. Genet. 2010, 19(1): 147-158). In one embodiment, AAV particles having AAV5 capsid proteins with increased transduction to cells in CNS may be those particles from U.S. Pat. No. 7,056,502, the content of which is incorporated herein by reference in its entirety.

[0156] In some embodiments, AAV particles of the present invention may comprise AAV6 capsid proteins or variants thereof. Recombinant AAV6 serotype can target motor neurons in the spinal cord by Intracerebroventricular (ICV) injection (Dirren E et al., Hum Gene Ther., 2014, 25(2): 109-120). In addition, a study from San Sebastian et al indicated that AAV6 serotype can be retrogradely transported from terminals to neuronal cell bodies in the rat brain (San Sebastian et al, Gen Ther., 2014, 20(12): 1178-1183).

[0157] In some embodiments, AAV particles of the present invention may comprise AAV8 capsid proteins or variants thereof. AAV particles with AAV8 capsid proteins can transduce neurons, for example in hippocampus (Klein R L et al., Mol Ther., 2006, 13(3): 517-527). In one embodiment, AAV8 capsid proteins may comprise the amino acid sequence of SEQ ID NO: 2 of U.S. Pat. No. 8,318,480, the content of which is herein incorporated by reference in its entirety.

[0158] In some embodiments, AAV particles of the present invention may comprise AAV9 capsid proteins or variants thereof. AAV9 capsid serotype mediated gene delivery has been observed in the brain with efficient and long-term expression of transgene after intraparenchymal injections to the CNS (Klein R L et al., Eur J Neurosci., 2008, 27: 1615-1625). AAV9 serotype can produce robust and wide-scale neuronal transduction throughout the CNS after a peripheral, systemic (e.g., intravenous) administration in neonatal subjects (Foust K D et al., Nat. Biotechnol., 2009, 27: 59-65; and Duque S et al, Mol Ther., 2009, 17: 1187-1196). Intrathecal (intra-cisterna magna routes) administration of AAV9 serotypes can also produce widespread spinal expression. In one embodiment, AAV9 serotype may comprise an AAV capsid protein having the amino acid sequence of SEQ ID NO: 2 of U.S. Pat. No. 7,198,951, the content of which is incorporated herein by reference in its entirety. In another aspect, AAV9 serotype may comprise VP1 capsid proteins of SEQ ID NOs: 2, 4 or 6 in which at least one of surface-exposed tyrosine residues in the amino acid sequence is substituted with another amino acid residue, as disclosed in US patent publication No. US20130224836, the content of which is incorporated herein by reference in its entirety.

[0159] In some embodiments, AAV particles of the present invention may comprise AAVrh10 capsid proteins or variants thereof. AAV particles comprising AAVrh10 capsid proteins can target neurons, other cells as well, in the spinal cord after intrathecal (IT) administration. In one embodiment, AAVrh10 capsid proteins may comprise the amino acid sequence of SEQ ID NO: 81 of EP patent NO: 2341068.

[0160] In some embodiments, AAV of the present invention may comprise AAVDJ capsid proteins, AAVDJ/8 capsid proteins, or variants thereof. Holehonnur et al showed that AAVDJ/8 serotype can target neurons within the Basal and Lateral Amygdala (BLA) (Holennur R et al., BMC Neurosci, 2014, February 18:15:28). In one embodiment, AAVDJ capsid proteins and/or AAVDJ/8 capsid proteins may comprise an amino acid sequence comprising a first region that is derived from a first AAV serotype (e.g., AAV2), a second region that is derived from a second AAV serotype (e.g., AAV8), and a third region that is derived from a third AAV serotype (e.g., AAV9), wherein the first, second and third region may include any amino acid sequences that are disclosed in this description.

[0161] In some embodiment, AAV particles produced according to the present invention may comprise single stranded DNA viral genomes (ssAAVs) or self-complementary AAV genomes (scAAVs). scAAV genomes contain both DNA strands which anneal together to form double stranded DNA. By skipping second strand synthesis, scAAVs allow for rapid expression in the cell.

[0162] In one embodiment, AAV particles of the present invention may comprise capsid proteins that have been shown to or are known to transduce dorsal root ganglions (DRGs).

[0163] In one embodiment, AAV particles of the present invention may comprise capsid proteins that have been shown or are known to transduce motor neurons.

[0164] In one embodiment, the AAV particles comprise a self-complementary (SC) viral genome.

[0165] In one embodiment, the AAV particles comprise a single stranded (SS) genome.

[0166] In one embodiment, an AAV particle comprising a self-complementary (sc) viral may be used to yield higher expression than an AAV particle comprising a corresponding single stranded viral genome.

[0167] In one embodiment, the serotype of the AAV particles described herein may depend on the desired distribution, transduction efficiency and cellular targeting required. As described by Sorrentino et al. (comprehensive map of CNS transduction by eight adeno-associated virus serotypes upon cerebrospinal fluid administration in pigs, Molecular Therapy accepted article preview online 7 Dec. 2015; doi:10.1038/mt.2015.212; the contents of which are herein incorporated by reference in its entirety), AAV serotypes provided different distributions, transduction efficiencies and cellular targeting. In order to provide the desired efficacy, the AAV serotype needs to be selected that best matches not only the cells to be targeted but also the desired transduction efficiency and distribution.

[0168] The invention also provides nucleic acids encoding the mutated or modified virus capsids and capsid proteins of the invention. In some embodiments the capsids are engineered according to the methods of co-owned and co-pending application PCT/US2015/034799 filed Jun. 9, 2015, the contents of which are incorporated herein by reference in their entirety and methods known in the art.

### Regulatable-AAV Particle

[0169] Described herein are regulatable-AAV particles comprising regulatable elements, which allow the payload expression to be controlled quickly and tightly in a spatial and temporal manner. This will allow the payload expression to be adjusted to the appropriate levels at the appropriate time.

[0170] In one embodiment, the present invention provides administration and/or delivery methods for regulatable-AAV particles. As used herein, the term “regulatable-AAV particle” is an AAV particle which comprises a capsid, a polynucleotide, and one or more regulatable elements and/or a payload which is regulated by one or more regulatable elements. As used herein, the term “regulatable element” (also referred to as regulatory element) refers to one or more components, factors, polynucleotide features or motifs which imparts regulatable or tunable features to regulate the expression of a payload.

[0171] In one embodiment, the payload and the regulatable element may be located on the same viral genomes. In one embodiment, the payload and the regulatable element may be located on separate viral genomes.

### Regulatable Elements

[0172] In one embodiment, in the development of regulatable-AAV particles several parameters for effective regulation are considered such as, but not limited to, the effect on the endogenous expression of the genes, restricting the expression of the transgene to the intended cell type, allow for an “OFF” state for the payload to provide little to no expression of the payload, allow for the expression of the payload to be turned on and off quickly, induce expression of the payload by stimulus or drug.

[0173] In one embodiment, the regulatable-AAV particle comprising at least one regulatable element should have no effects on the endogenous expression of genes and be non-immunogenic, so as not to interfere with the desired outcome of payload expression.

[0174] In one embodiment, the regulatable elements may be chosen in a manner that will restrict the expression of the transgene to the intended cell type specific expression.

[0175] In one embodiment, the regulatable elements must allow the payload to be in an “OFF” state, which allows very little or no expression of the payload.

[0176] In one embodiment, the regulatable elements may allow payload expression be turned on and off quickly, and also provide a means by which the level of payload expression can be regulated over a wide range in a dose dependent manner.

[0177] In one embodiment, it may be desirable to provide a regulatable element, which may be induced by a stimulus or drug, which is administered when payload expression is wanted, and removed when the payload expression is no longer needed.

[0178] In one embodiment, the viral genome may comprise the regulatable element. In one embodiments, the regulatable element may be the payload. In one embodiment, the viral genome may comprise one or more regulatable elements and the transgene of interest may be located on a separate viral genome. Various arrangements of the regulatable elements are envisioned as part of the invention described herein. Components can be upstream or downstream of each other within the payload construct or viral genome. In some embodiments, they may be located on more than one payload constructs. In some embodiments the payload is a regulatable element. In a non-limiting example, the payload is a CRISPR regulatable element.

[0179] In some embodiments, viral genome encoding the gene of interest and payload constructs comprising one or more regulatable elements may be on two or more separate payload constructs, packaged into separate AAV particles. In some embodiments, the optimal ratio of the two or more AAV particles needed to achieve the desired expression and regulation must be determined experimentally. In some embodiments, the two or more AAV particles may be administered in equal amounts. In some embodiments, the two or more AAV particles may be administered in unequal amounts. In a non-limiting example, a AAV particle comprising the payload construct encoding the gene of interest, may be delivered at a lower dose than the one or more viral genomes comprising the one or more regulatable elements. In another non-limiting example, a AAV particle comprising the payload construct encoding the gene of interest, may be delivered at a higher dose than the one or more regulatory-AAV particles comprising the one or more regulatable elements.

[0180] In one embodiment, the regulatable element may be positioned within the capsid VP2 domain. The VP2 viral capsid protein may be chosen, since it has been shown to tolerate large insertions. For example, Lux et al. (J Virol. 2005 September; 79(18): 11776-11787; Green Fluorescent Protein-Tagged Adeno-Associated Virus Particles Allow the Study of Cytosolic and Nuclear Trafficking) inserted a 27-kDa GFP protein as a GFP-VP2 fusion protein into an AAV capsid. Incorporation of GFP-VP2 into the AAV capsid did not interfere with viral assembly or viral genome packaging, and the GFP-tagged virions produced in the present study retained infectivity. Since then other studies have used the VP2 capsid as an insertion point, for example for a rapamycin inducible chemical switch, which controls viral infectivity, as described in Hoerner et al., (Chem. Commun., 2014, 50, 10319-10322), the contents of which is herein incorporated by reference in its entirety.

[0181] In some embodiments, the regulatable element may be positioned at the N terminus of VP2. As a non-limiting example, the regulatable element may be located within the first 1%, 2%, 3%, 4%, 5%, 6%, 7%, 8%, 9%, 10%, 15%, 20%, 25%, 30%, 35%, 40%, 45%, 46%, 47%, 48,% or 49% of the VP2 capsid. As another non-limiting example, the regulatable element may be located within the last 1%, 2%, 3%, 4%, 5%, 6%, 7%, 8%, 9%, 10%, 15%, 20%, 25%, 30%, 35%, 40%, 45%, 46%, 47%, 48,% or 49% of the VP2 capsid. As a non-limiting example, the regulatable element may be located in the middle of the VP2 capsid. As another non-limiting example, the regulatable element may be located near the beginning of the VP2 capsid (N terminus). As yet another non-limiting example, the promoter and/or transactivation domain may be located near the end of the VP2 capsid (C terminus).

[0182] In some embodiments, the regulatable element may be made available upon uncoating of the AAV particle, leading to a burst in the expression of the payload. In some embodiments the regulatable element may be released in the nucleus. In some embodiments, the fusion protein comprised in the regulatable element may be released from the VP2 domain through a 2A peptide sequence.

[0183] In one embodiment, the regulatable element may comprise one component. In another embodiment, the regulatable element may comprise two or more components. Without wishing to be bound by theory, a greater number of components may further fine tune the level of control. In some embodiments, the regulatable element components may comprise one or more transcription factors, fusion proteins and/or nucleases or recombinases, CRISPR components, and any combination thereof. In one embodiment, the regulatable element may comprise three or four components. In one embodiment, the regulatable element may comprise at least one protein or fusion protein. In one embodiment, the regulatable element may comprise two or more proteins or fusion proteins. In one embodiment, the one or more regulatable elements may be modulated or regulated by chemical agents (including but not limited to ligands).

[0184] In one embodiment, a hierarchy of regulatable elements may exist, in which for example a first regulatable element regulates the expression of a second regulatable element, which in turn regulates the expression of the payload gene of interest. In some embodiments even more tiers of regulation may be provided. Without wishing to be bound by theory, additional components and/or tiers of regulatable elements may help create a tighter more fine-tuned regulation of payload gene expression.

[0185] In one embodiment, the regulatable element may act on one or more promoters driving expression of one or more payloads. In one embodiment, the promoter may comprise one or more response elements for a transcription factor, which is specific for a particular tissue, or for a fusion protein, which is inducible by a particular chemical agent or physiological stimulus. In one embodiment, the regulatable element may comprise one or more fusion proteins, which comprise one or more of domains selected from a DNA binding domain, a transactivation domain and optionally a ligand binding domain. In one embodiment, payload expression may be induced by a ligand or stimulus in a dose-dependent manner.

[0186] In another embodiment, the regulatable element may regulate the expression of one or more payloads through disruption, e.g., cleavage, of the payload construct(s).

[0187] In one embodiment, the regulatable element may include an siRNA or miRNA, which can bind to the payload construct. In one embodiment, the payload construct may comprise a microRNA binding site. In one embodiment, an siRNA binding site may be present in the payload construct. In one embodiment, the regulatable element may comprise a ribozyme.

[0188] In one embodiment, the regulatable element may comprise a heterologous domain whose function affects the stability of the payload, e.g. stabilizes or destabilizes the payload.

[0189] In one embodiment, the regulatable element may comprise a heterologous domain, whose function may be further regulated or modulated by a ligand that binds to the domain.

[0190] In one embodiment, the regulatable element may comprise a heterologous domain which may be stabilized in the presence of the ligand, and destabilized in the absence of the ligand.

[0191] In another embodiment, the regulatable element may comprise a heterologous domain which may be destabilized in the presence of the ligand, and stabilized in the absence of the ligand.

[0192] In some embodiments, the regulatable element may comprise a heterologous domain which may function to provide burst expression of the payload.

[0193] In some embodiments the, the regulatable element may comprise a heterologous domain which may allow low payload expression levels.

[0194] In one embodiment, the regulatable element may transiently induce the expression of one or more payloads. In one embodiment, the payload expression may be transiently turned off through the regulatable element. In one embodiment, payload expression may be permanently turned on through the regulatable element. In one embodiment, the payload expression may be irreversibly turned off at a desired time. In one embodiment, the payload expression may be reversibly turned on or off. In one embodiment, the regulatable element may also be temporally and spatially regulated.

[0195] In one embodiment, regulatable-AAV particles may comprise at least one regulatable element and/or payloads comprising CRISPR elements, TALEN, or zinc finger nuclease elements.

[0196] In one embodiment, the regulatable element may comprise a component which comprises an endonuclease or recombinase. In one embodiment, the endonuclease or recombinase may be a fusion protein with a site specific DNA binding domain and a cleavage domain.

[0197] In one embodiment, the regulatable element may comprise a CRISPR (Clustered Regularly Interspersed Short Palindromic Repeats) regulatable element.

[0198] In one embodiment, the regulatable-AAV particle comprises a regulatable element where the expression of the protein or fusion protein may be driven by a constitutive promoter.

[0199] In another embodiment, the regulatable-AAV particle comprises a regulatable element where the expression of the protein or fusion protein may be driven by an inducible promoter, which may be induced or repressed in the presence of a ligand.

[0200] In another embodiment, the regulatable-AAV particle comprises a regulatable element where the expression of the protein or fusion protein may be driven by a tissue-specific promoter such that the regulatable element is only expressed in certain tissues.

[0201] In some embodiments, the payload expression occurs in a dose-dependent manner, depending on the dose of the chemical agent or physiological stimulus. Agents and systems must also be tested to ensure that receptors and chemical agents or physiological stimuli have minimal effects on endogenous gene expression and normal cellular responses. A short half-life is also desirable, for fast control of payload expression upon removal of the chemical agent.

[0202] In some embodiments, additional levels of regulation may be added, e.g., additional regulatable elements, may provide even tighter tissue-specific and temporal control of the payload. In some embodiments, two or three or more levels of regulatable elements are provided.

[0203] Various spatial arrangements of the regulatable elements can be envisioned according to the present invention. Components of the regulatable elements can be upstream or downstream of each other. In some embodiments, they may be located on more than one payload constructs. In some embodiments the regulatable elements may be located within one or more viral genomes.

[0204] According to the present invention any of the proteins or fusion proteins described herein, including but not limited to, CRISPR/Cas9, restriction endonucleases, recombinases, integrases, transcriptional activators, transcriptional repressor, dimerization fusion proteins, may be positioned within the VP2 domain. As a non-limiting example, the regulatable element may be a DNA binding domain, and a transactivation domain which may regulate cas9 expression or a DNA binding domain coupled to a transactivating factor, which may regulate cas9 expression. The DNA binding domain may be coupled to the transactivation domain using any methods known in the art or described herein. In one embodiment, the DNA binding domain, which binds to regulatable elements within the cas9 promoter and/or a transactivating factor may be located within the sequence encoding the VP2 capsid. As a non-limiting example, the DNA binding domain and/or transactivation domain may be located within the first 1%, 2%, 3%, 4%, 5%, 6%, 7%, 8%, 9%, 10%, 15%, 20%, 25%, 30%, 35%, 40%, 45%, 46%, 47%, 48,% or 49% of the VP2 capsid. As another non-limiting example, the DNA binding domain and/or transactivation domain may be located within the last 1%, 2%, 3%, 4%, 5%, 6%, 7%, 8%, 9%, 10%, 15%, 20%, 25%, 30%, 35%, 40%, 45%, 46%, 47%, 48,% or 49% of the VP2 capsid. As a non-limiting example, the DNA binding domain and/or transactivation domain may be located in the middle of the VP2 capsid. As another non-limiting example, the DNA binding domain and/or transactivation domain may be located near the beginning of the VP2 capsid (N terminus). As yet another non-limiting example, the promoter and/or transactivation domain may be located near the end of the VP2 capsid (C terminus).

[0205] In another embodiment, any of the regulatable element components described herein may be inserted into the VP1 domain. In another non-limiting example, any of the regulatable element components may be inserted into the VP3 domain.

### Regulatable Elements: Fusion Proteins

[0206] In one embodiment, the regulatable-AAV particle comprises at least one regulatable element that when expressed may comprise a protein or a fusion protein.

[0207] In one embodiment, the regulatable-AAV particle comprises at least one regulatable element that when expressed may comprise one protein or one fusion protein. The protein or fusion protein may be or be part of the Tet ON/OFF system, or the GeneSwitch system or the protein or fusion protein may respond to hormones, physiological stimulus or light.

[0208] In one embodiment, the regulatable-AAV particle comprises at least one regulatable element that when expressed may comprise dimerizable fusion proteins. The protein or fusion protein may respond to hormones, physiological stimulus, rapamycin, or light.

[0209] In one embodiment, the regulatable-AAV particle comprises at least one regulatable element that when expressed may comprise a fusion proteins which has been modified. A non-limiting example of the modifications may alter their ligand binding domains or the modifications can create novel fusion proteins with new binding specificities.

### Single Fusion Proteins

[0210] In one embodiment, the regulatable element, when expressed, may comprise a protein or fusion protein which is capable of driving expression from the promoter of the payload.

[0211] In one embodiment, the regulatable element, when expressed, may comprise a fusion protein which may comprise a DNA binding domain, a transactivation domain and optionally a ligand binding domain.

[0212] In some embodiments, the regulatable element of the regulatable-AAV particle may encode a protein or fusion protein which may require the presence of a chemical agent, such as a ligand, or a physiological stimulus for transcriptional activation to occur. Without wishing to be bound by theory, the protein or fusion protein may either only be able to bind to the promoter in the presence of a chemical agent or physiological stimulus or may only be able to transactivate transcription in the presence of a chemical agent or physiological stimulus. In another embodiment, the fusion protein may only be able to activate transcription in the absence of the chemical agent or stimulus.

[0213] In one embodiment, the regulatable element of the regulatable-AAV particle may encode fusion proteins which may comprise a DNA binding domain. Non-limiting examples of DNA binding domains are helix-turn-helix, zinc finger, leucine zipper, winged helix, winged helix turn helix, helix-loop-helix, HMG-box, Wor3 domain, immunoglobulin fold, B3 domain, TAL effector DNA-binding domains and RNA-guided DNA-binding domains.

[0214] Non-limiting examples of transcription factors, from which these DNA binding domains may be derived from are Gal4, CREB, HSF, ZFHD1, Ecdysone Receptor, Nuclear Receptors, such as glucocorticoid receptor, RXR, RAR, Stat proteins, myc, Tal effectors, LexA, and the like. In one embodiment, the DNA binding domain is a ZFHD1 domain. ZFHD1 is DNA binding domain composed of a zinc finger pair and a homeodomain.

[0215] In some embodiments, the DNA binding domains may be engineered zinc finger proteins. Zinc finger proteins can be engineered to recognize any suitable target site in a promoter, such as the promoter. Methods are known in the art to design or select a zinc finger protein with high specificity and affinity to its target site and are for example described in U.S. Pat. No. 6,933,113, U.S. Pat. No. 6,933,113, U.S. Pat. No. 6,607,882 and U.S. Pat. No. 6,777,185, the contents of each of which is herein incorporated by reference in its entirety.

[0216] In one embodiment, the DNA binding domains originate from transcription factors including GAL4, ZFHD1, VP16, VP64 and NFkB (p65).

[0217] In one embodiment, the regulatable element of the regulatable-AAV particle may encode fusion proteins which may comprise a transactivation domain. A non-limiting example of a transactivation domains is the nine-amino-acid transactivation domain. Non-limiting examples of transcription factors from which transactivation domains may be derived from are Gal4, Oaf1, Leu3, Rtg3, Pho4, Gln3, Gcn4, p53, RTg3, CREB, Gli3, E2A, HSF1, NF-IL6, myc, NFAT, BP64, B42, NF-κB and VP16, and VP64. In one embodiment, the transactivation domains originate from transcription factors including GAL4, ZFHD1, VP16, VP64 and NFkB (p65).

[0218] In some embodiments, the regulatable element of the regulatable-AAV particle may encode fusion proteins which may comprise a transcriptional repressor domain. In some embodiments, the transcriptional repressor domain may be a KRAB, ERD, or SID transcriptional repressor domain.

[0219] In one embodiment, the regulatable element of the regulatable-AAV particle may encode fusion proteins which may comprise a ligand binding domain. Non-limiting examples of ligand binding domains are those of Ecdysone Receptor, Nuclear Receptors, such as glucocorticoid receptor, RXR, RAR, and modified forms thereof.

### The Tet ON/OFF System

[0220] In one embodiment, the regulatable-AAV particle comprises a regulatable element that when expressed may comprise a tetracycline transactivator protein which is part of the Tet-Off or Tet-On system (first described in Bujard and Gossen (Proc Natl Acad Sci USA. 1992 Jun. 15; 89(12):5547-51, Tight control of gene expression in mammalian cells by tetracycline-responsive promoters, the contents of which is herein incorporated by reference in its entirety)). The Tet-Off system makes use of the tetracycline transactivator (tTA) protein, which is a fusion protein comprising the E. coli tetracycline repressor TetR and the Herpes Simplex Virus VP16 transactivation domain. The tTA protein is able to bind to DNA at specific TetO operator sequences. In most Tet-Off systems, several repeats of such TetO sequences are placed upstream of a minimal promoter, such as the CMV promoter (tetracycline response element (TRE)). In a Tet-Off system, tetracycline binds to the tetracycline transactivator protein and prevents its binding to TRE, thereby repressing expression of TRE-controlled genes. In the Tet-On system, tetracycline bound tetracycline transactivator protein binds to the TRE and activates transcription, i.e. activation of transcription occurs in the presence of tetracycline only. Doxirubicin is a derivative of tetracycline and also can be used.

[0221] In one embodiment, the viral genome comprises a promoter which may comprise one or more regulatable elements which imparts regulatable or tunable features to regulate the expression of a payload in the presence of tetracycline. In one embodiment, tetracycline may induce payload expression. In another embodiment, tetracycline may reduce payload expression.

[0222] In one embodiment, the regulatable-AAV particle comprises a regulatable element that when expressed may comprise a tetracycline transactivator protein, which binds to the promoter in the presence of tetracycline.

[0223] In one embodiment, the regulatable-AAV particle comprises a regulatable element that when expressed may comprise a tetracycline transactivator protein which in the absence of tetracycline, binds to the promoter.

[0224] In one embodiment, the regulatable-AAV particle comprises a regulatable element that when expressed may comprise a plurality of transactivator binding domains that are spaced such that when bound by transactivators, the transactivators are substantially rotationally aligned about the DNA helix, as described in US Publication No. US20030221203, the contents of which is herein incorporated by reference in its entirety.

[0225] In one embodiment, the viral genome comprises a promoter which may comprise tetracycline resistance operator sequences substantially free of interferon inducible response elements, as described in International Publication No. WO2002070719, the contents of which is herein incorporated by reference in its entirety. In one embodiment, a viral particle (e.g., AAV particle or regulatory-AAV particle) of the present invention may comprise a polynucleotide encoding a payload driven by a promoter and a second polynucleotide encoding a tetracycline-controlled transactivator driven by a regulatable element promoter. The two promoters may drive expression in opposite directions, towards each other and away from the inverted terminal repeats, as described in U.S. Pat. No. 7,811,814 and U.S. Pat. No. 7,456,015, the contents of each of which is herein incorporated by reference in its entirety. In another embodiment, the two promoters may drive expression in the same direction. As a non-limiting example, the payload may have a therapeutic effect on a nervous system disorder.

### Hormone Responsive Systems

[0226] In one embodiment, the regulatable-AAV particles comprise an inducible expression system. Several inducible expression systems utilize steroid response switches using non-human analogs to regulate expression. These systems comprise modular recombinant receptor fusion proteins consisting of mutated ligand-binding domains fused to appropriate transcription factor DNA-binding and activation domains. The receptor fusion proteins can be constitutively expressed and activate transcription of their target genes when a ligand is present and binds to it. For example, a chimeric Drosophila/Bombyx ecdysone receptor (DB-EcR), which is able to bind a modified ecdysone promoter and which achieved transactivation of a reporter gene in the presence of ecdysone agonist GS-E, is described in Hoppe et al. (Mol Ther. 2000 February; 1(2):159-64, the contents of which is herein incorporated by reference in its entirety).

[0227] In some embodiments, the viral genome comprises a promoter which may comprise response elements which may be regulated by a steroid response switch using non-human analogs, including but not limited to Ecdysone. In some embodiments, the regulatable element may comprise or encode a chimeric ecdysone receptor.

[0228] In some embodiments, the ecdysone receptor binding domain may be selected from, but is not limited to, an invertebrate ecdysone receptor ligand binding domain, an Arthropod ecdysone receptor ligand binding domain, a Lepidopteran ecdysone receptor ligand binding domain, a Dipteran ecdysone receptor ligand binding domain, an Orthopteran ecdysone receptor ligand binding domain, a Homopteran ecdysone receptor ligand binding domain, a Hemipteran ecdysone receptor ligand binding domain, a spruce budworm Choristoneura fumiferana ecdysone receptor ligand binding domain, a beetle Tenebrio molitor ecdysone receptor ligand binding domain, a Manduca sexta ecdysone receptor ligand binding domain, a Heliothies virescens ecdysone receptor ligand binding domain, a midge Chironomus tentans ecdysone receptor ligand binding domain, a silk moth Bombyx mori ecdysone receptor ligand binding domain, a squinting bush brown Bicyclus anynana ecdysone receptor ligand binding domain, a fruit fly Drosophila melanogaster ecdysone receptor ligand binding domain, a mosquito Aedes aegypti ecdysone receptor ligand binding domain, a blowfly Lucilia capitata ecdysone receptor ligand binding domain, a blowfly Lucilia cuprina ecdysone receptor ligand binding domain, a Mediterranean fruit fly Ceratitis capitata ecdysone receptor ligand binding domain, a locust Locusta migratoria ecdysone receptor ligand binding domain, an aphid Myzus persicae ecdysone receptor ligand binding domain, a fiddler crab Celuca pugilator ecdysone receptor ligand binding domain, an ixodid tick Amblyomma americanum ecdysone receptor ligand binding domain, a whitefly Bamecia argentifoli ecdysone receptor ligand binding domain and a leafhopper Nephotetix cincticeps ecdysone receptor ligand binding domain.

[0229] In some embodiments, the regulatable-AAV particle comprises a regulatable element that expresses a steroid hormone receptor transactivation fusion protein.

[0230] In one embodiment, the steroid hormone receptor transactivator fusion protein may comprise a glucocorticoid receptor. In some embodiments the promoter may comprise one or more glucocorticoid response elements (GRE). In some embodiments, the promoter may be inducible through steroids, such as dexamethasone.

[0231] In some embodiments, the regulatable-AAV particle comprises a regulatable element that when expressed may comprise a glucocorticoid receptor as described in US Publication No. US20030031650, the contents of which is herein incorporated by reference in its entirety.

[0232] In one embodiment, the regulatable-AAV particle comprises a regulatable element that expresses a tamoxifen dependent expression system.

[0233] In one embodiment, payload expression may be regulated by tamoxifen through a tamoxifen dependent expression system.

[0234] In some embodiments, the regulatable-AAV particle comprises a regulatable element that when expressed may comprise a tamoxifen regulatable fusion protein, which can bind to regulatable elements in the promoter. In some embodiments, the tamoxifen regulatable fusion protein may comprise a DNA binding domain, a tamoxifen binding domain, and/or a transactivation domain. As a non-limiting example, Roscilli et al., 2002 (Mol Ther. 2002 November; 6(5):653-63. Long-term and tight control of gene expression in mouse skeletal muscle by a new hybrid human transcription factor, the contents of which is herein incorporated by reference in its entirety), describes a hydroxytamoxifen (4-OHT)-dependent fusion protein comprising the DNA binding domain of the human hepatocyte nuclear factor-1alpha (HNF1alpha), which is not expressed in muscle cells, a G(521)R mutant of the ligand binding domain of human estrogen receptor-alpha (ERalpha), and the activation domain derived from human nuclear factor-kappaB p65 subunit (NF-kappaB p65). Efficient expression in muscle cells was achieved from a promoter containing multimeric HNF1alpha binding sites in the presence of ligand.

[0235] In one embodiment, the regulatable-AAV particle comprises a regulatable element that expresses an inducible system that utilizes endogenous receptors and/or steroid hormones. In some embodiments, a payload may be regulated by an inducible system that utilizes endogenous receptors and/or steroid hormones. For example, Spiga and Borras (IOVS, 2010, Vol. 51, No. 6, Development of a Gene Therapy Virus with a Glucocorticoid-Inducible MMP1 for the Treatment of Steroid Glaucoma, the contents of which is herein incorporated by reference in its entirety), describe a glucocorticoid-inducible vector that expresses transgene in the presence of dexamethasone, which may have utility in the treatment of steroid-induced glaucoma resulting from the use of steroids in the treatment of macular edema.

[0236] In one embodiment, the regulatable-AAV particle comprises a regulatable element that expresses a combination of endogenous receptor and endogenous or exogenous ligands. In some embodiments, payload expression may be regulated through the combination of endogenous receptor and endogenous or exogenous ligands.

### The GeneSwitch System

[0237] In one embodiment, the regulatable-AAV particle comprises a regulatable element that expresses the GeneSwitch System (Life Technologies). The GeneSwitch System is a mifepristone-inducible mammalian expression system originally described in Wang, Y., B. W. O'Malley, J., Tsai, S. Y., and O'Malley, B. W. (1994), A Regulatory System for Use in Gene Transfer. Proc. Natl. Acad. Sci. USA 91, 8180-8184, the contents of which is herein incorporated by reference in its entirety. The system comprises a hybrid regulatory protein containing a DNA binding domain from the yeast GAL4 protein, a truncated ligand binding domain from the human progesterone receptor, and an activation domain from the human NF-κB protein. This fusion protein binds to the synthetic steroid, mifepristone, and functions as a ligand-dependent transcription factor to induce expression of the gene of interest as well as its own expression. Transgene expression is controlled by a hybrid promoter consisting of Saccharomyces cerevisiae GAL4 upstream activating sequences.

[0238] In one embodiment, the regulatable-AAV particle comprises a regulatable element which imparts regulatable or tunable features to regulate the expression of a payload in the presence of mifepristone.

[0239] In one embodiment, the regulatable-AAV particle comprises at least one regulatable element that when expressed may comprise a fusion protein as described in Wang et al. (described above, the contents of which is herein incorporated by reference in its entirety).

[0240] In one embodiment, payload expression may be regulated simultaneously on the transcriptional and a post-translational level. The regulatable element may be inducible through a first ligand, such as for example mifepristone, thereby driving expression of the payload. The payload, in turn, must dimerize upon administration of a second ligand to be activated. Without wishing to be bound by theory, allowing two levels of regulation may provide for tighter control of payload expression. A non-limiting example of a double inducible system according to the present invention is described in US Publication No. US20090293139, the contents of which is herein incorporated by reference in its entirety.

[0241] In one embodiment, the regulatable-AAV particle comprises a regulatable element that when expressed may comprise a fusion protein comprising the bacterial repressor LexA. While not wishing to be bound by theory, LexA does not resemble eukaryotic transcription factors and is thus less likely to bind to endogenous promoters. LexA binding sites can be inserted into the promoter driving the gene of interest.

[0242] In one embodiment, the viral genome comprises a promoter may comprise one or more LexA binding sites. In one embodiment, the regulatable element may comprise a fusion protein comprising the DNA binding domain of a bacterial LexA protein, a truncated ligand binding domain of a human progesterone receptor and an activation domain of the p65 subunit of human NF-kappaB. In one embodiment, the payload expression may be mifepristone-inducible.

[0243] In one embodiment, the regulatable-AAV particle comprises a regulatable element that when expressed may comprise the fusion protein described in U.S. Pat. No. 8,852,928, the contents of which is herein incorporated by reference in its entirety.

[0244] In one embodiment, the regulatable-AAV particle comprises a regulatable element that when expressed may comprise a fusion protein comprising a mutated GAL4 binding domain, which decreases dimerization of the regulator protein occurring in the absence of a anti-progestin ligand, as described in U.S. Pat. No. 7,579,326, the contents of which is herein incorporated by reference in its entirety.

### Physiological Stimulus Inducible Systems

[0245] In some embodiments, the expression of the payload may be induced by a physiological or other stimulus.

[0246] In one embodiment, the regulatory-AAV particle may comprise one or more regulatable elements which imparts regulatable or tunable features to regulate the expression of a payload in the presence of a physiological or chemical stimulus. These stimuli may include, but are not limited to, light, heat, radiation, glucose levels, hypoxia, or metals.

[0247] In some embodiments, the expression of the payload may be regulated by light. As a non-limiting example, Ye H, et al. (Science. 2011 Jun. 24; 332(6037):1565-8, the contents of which is herein incorporated by reference in its entirety) describe a system, in which the expression of a transgene under control of a NFAT-dependent promoter can be driven by illumination and can be regulated over time simply by modulating the patterns of light over periods of hours to days.

[0248] In one embodiment, the viral genome comprises a promoter which may comprise one or more NFAT binding elements as described in Ye H., et al. (described above, the contents of which is herein incorporated by reference in its entirety).

[0249] In some embodiments, the payload may be induced in the context of radiation therapy, e.g. in the context of a cancer therapy regimen. In one embodiment, the expression of the payload may be dependent on a radiation-inducible promotor. Non-limiting examples of promoters that can be used are Egr-1, VEGF, Rec-A, and WAF-1 promoters (see e.g., Goverdhana et al., 2005, Mol Ther. 2005 August; 12(2): 189-211, the contents which is herein incorporated by reference in its entirety, and references therein). While not wishing to be bound by theory, using these types of promoters provide the potential to restrict expression to the tissue receiving the radiation therapy, while expression in the adjacent, healthy tissue is not induced.

[0250] In some embodiments, the expression of the payload may be driven by glucose regulatable elements in the promoter. In a non-limiting example, glucose regulatable elements may be useful to drive an insulin payload.

[0251] In some embodiments, the expression of the payload may be regulated by hypoxia regulatable element. While not wishing to be bound by theory, the hypoxia regulatable element binds HIF-1 alpha and beta (hypoxia inducible factor), which permits the selective induction of gene expression in a hypoxic environment. This phenomenon may be exploited in a cancer setting. In one study, a rAAV was generated in which the transgene can be regulated by hypoxia in human brain tumors (Kantor et al., the contents of each which is herein incorporated by reference in its entirety, and references therein).

[0252] In one embodiment, the expression of the payload may be regulated by a metal regulatable element. Metal regulatable elements can be found within promoters of metallothionin genes which are recognized by the transcription factor MTF-1 (see e.g., Daniels et al., 2002 (Nucl. Acids Res. 2002 Vol 30, No. 14), the contents of which is herein incorporated by reference in its entirety). In some embodiments, the DNA binding domain of MTF or binding factor of another metal regulatable element may be used in a combination with a metal in an inducible system to regulate payload expression.

[0253] In one embodiment, the payload expression may be regulated by a heat shock regulatable element and binding heat shock regulatable element binding protein, either in the context of endogenous expression of proteins as part of the heat shock response, or as part of an artificial system including heat shock response elements and a protein or fusion protein which comprises a heat shock factor DNA binding domain.

[0254] In one embodiment, the viral genome comprises a promoter which may comprise elements of a heat shock promoter. Non-limiting examples of the heat shock protein (HSP) promoters include HSP70, HSP90, HSP60, HSP27, HSP72, HSP73, HSP25 and HSP28, or ubiquitin promoter as described in U.S. Pat. No. 7,285,542, the contents of which is herein incorporated by reference in its entirety. A minimal heat shock promoter derived from HSP70 may also be used. The conditions which activate the heat shock promoter are hyperthermic conditions, which may comprise a temperature between about basal temperature and about 42° C. In one embodiment, a viral genome comprises a heat shock promoter such as the promoters described in U.S. Pat. No. 7,595,386, the contents of which is herein incorporated by reference in its entirety.

[0255] In one embodiment, a pulsatile signal may be applied with a stimulator to modulate the transcription of a gene of interest in the target tissue. In one embodiment, the tissue is neural tissue. In one aspect, the neural tissue is brain tissue.

[0256] In one embodiment, the viral genome comprises a promoter which may comprise one or more regulatable sequences that respond to a pulsatile stimulus. Such pulsatile stimulus responsive regulatable sequences may be identified as described in US20070059290, the contents of which is herein incorporated by reference in its entirety. In some embodiments, payload expression may be activated through the pulsatile stimulus. In some embodiments, payload expression may be repressed through the pulsatile stimulus.

Light inducible Single Fusion Proteins

[0257] In one embodiment, the regulatory-AAV particle may comprise one or more regulatable elements which imparts regulatable or tunable features to regulate the expression of a payload in the presence of a light stimulus.

[0258] In one embodiment, the regulatory-AAV particle may comprise one or more regulatable elements which imparts regulatable or tunable features to regulate the expression of a payload in the presence of a blue light. Expression of only a single fusion protein can be used to directly activate transcription of the payload in response to blue light. The light-responsive DNA-binding protein (LRDP) can be provided containing both a light-oxygen-voltage (LOV) domain and DNA-binding domain, which is fused to a transcriptional activation domain, as described in US Publication No. US20140325692, the contents of which is herein incorporated by reference in its entirety.

[0259] In one embodiment, the regulatable element, when expressed, is a light responsive, LOV domain containing DNA binding protein with a transactivation domain, as described in US Publication No. US20140325692, the contents of which is herein incorporated by reference in its entirety.

[0260] In one embodiment, the regulatable element, when expressed, comprises a light inducible fusion protein. As a non-limiting example, the light inducible fusion protein is a E. litoralis 222 amino acid protein (EL222)-VP16 chimera.

### Dimerizable Fusion Proteins

[0261] In one embodiment, the regulatable-AAV comprises a regulatable element which may comprise two or more fusion proteins which may further fine tune the level of control over the payload expression.

[0262] In one embodiment, the regulatable-AAV comprises a regulatable element which when expressed comprises two fusion proteins, each of which comprise a dimerization ligand binding domain. In one embodiment, the first fusion protein may contain a DNA-binding domain of a transcription factor, which binds to the promoter driving expression of the payload, fused to a dimerization ligand binding domain. In one embodiment, the second fusion protein may contain a transactivation domain fused to a dimerization ligand binding domain. In one embodiment, the transactivation domain may be capable of activating the transcription factor, which binds to the promoter in the viral genome.

[0263] In one embodiment, the regulatable-AAV comprises a regulatable element which when expressed comprises the dimerization ligand binding domain may require the binding of a chemical agent or physiological stimulus in order for dimerization to occur. In some embodiments, the dimerization ligand binding domains of the two fusion proteins may not be able to bind to each other in the absence of the chemical agent or physiological stimulus. In some embodiments, the chemical agent or physiological stimulus may result in the dimerization of two fusion proteins and subsequent recruitment of the transactivation domain to the promoter in the payload construct. In some embodiments, both fusion proteins may bind simultaneously to the same chemical agent. In other embodiments, both fusion proteins may bind separately to the same or two different chemical agents. In another embodiment, no such chemical agent or physiological stimulus is required for one or both fusion proteins.

[0264] In some embodiments, the viral genome comprises a minimal promoter containing DNA binding elements to which the DNA binding domain binds, and transcription from the promoter may only occur in the presence of the chemical agent or stimulus.

[0265] In one embodiment, a constitutive promoter drives the expression of the regulatable element encoding the one or more fusion proteins. In another embodiment, at least one component of the regulatable element is driven by an inducible promoter. In another embodiment, the expression of all components of the regulatable element are driven by inducible promoters which may the same or different and be inducible or repressible by the same or by different chemical agents or ligands. In another embodiment, the promoter may drive tissue specific expression, such that the regulatable element is only expressed in certain tissues.

[0266] In one embodiment, the regulatable-AAV comprises a regulatable element which when expressed may comprise inducible systems such as, but not limited to, the ecdysone or rapamycin inducible systems.

### Hormone Inducible Systems

[0267] In one embodiment, the regulatory-AAV particle may comprise one or more regulatable elements which imparts regulatable or tunable features to regulate the expression of a payload in the presence of a hormone inducible system. Non-limiting examples of hormone inducible systems include steroid small molecules, Ecdysone inducible systems and/or the Rheoswitch system.

[0268] In one embodiment, the expression of the payload may be regulated through a non-steroid small molecule including, but not limited to, Ecdysone.

[0269] In one embodiment, the regulatable-AAV particle comprises a regulatable element that when expressed may encode an ecdysone inducible system. An Ecdysone inducible system is described in No et al., Proc Natl Acad Sci USA. 1996 Apr. 16; 93(8):3346-51, the contents of which is herein incorporated by reference in its entirety. The system comprises a system with a modified ecdysone receptor fusion protein with a GAL4 DNA binding domain, VpEcR, and heterodimeric partner fusion protein, RXR with a VP16 transactivation domain. Upon expression of RXR and VpEcR fusion proteins, the two receptors can heterodimerize and transactivate the EcRE-containing promoter, but only in the presence of the insect hormone ecdysone.

[0270] In one embodiment, the viral genome comprises a promoter which may comprise one or more regulatable elements suitable for the ecdysone inducible system. In one embodiment, the regulatable element when expressed may comprise a modified ecdysone receptor fusion protein with a GAL4 DNA binding domain, and RXR with a VP16 transactivation domain as a heterodimeric partner fusion protein. In one embodiment, the regulatable element when expressed may comprise one or more fusion proteins which are part of the multiple inducible gene regulation system described in U.S. Pat. No. 8,105,825, assigned to Intrexon, the contents of which is herein incorporated by reference in its entirety. In one embodiment, the ligand which induces the regulatable element may be described in U.S. Pat. No. 8,105,825 assigned to Intrexon.

[0271] In one embodiment, the regulatable-AAV particle comprises a regulatable element that when expressed may encode an Ecdysone inducible systems such as, but not limited to, the Rheoswitch system (Intrexon). In the Rheoswitch system controlled expression of the gene of interest is activated by the RheoSwitch® receptor (a heterodimer of an engineered ecdysone receptor ligand binding domain fused to a GAL4 DNA binding domain (GAL4:EcR) and a retinoid X receptor (RXR) protein fused to a VP16 activation domain (VP16:RXR)) only in the presence of an activator drug, as described in Karzenowski et al., 2006, Molecular Therapy (2006) 13, S194-S194, the contents of which is herein incorporated by reference in its entirety. While not wishing to be bound by theory, the small molecule ligand or activator drug, such as Intrexon's synthetic diacylhydrazine molecule veledimex or analogs thereof, triggers the conformational changes needed to activate transcription. Additionally, the ecdysone may demonstrate safety in mammals because the chemical agents or ligands are designed to activate the insect ecdysone receptor rather than mammalian receptors thus avoiding potential off target effects.

[0272] In one embodiment, the regulatable element when expressed may comprise a Rheoswitch system. In one embodiment, the regulatable element when expressed may comprise an ecdysone receptor fusion protein and a heterodimeric partner fusion protein. In some embodiments, the fusion proteins are those described in No et al. or derivatives thereof. In some embodiments, the fusion proteins are those described in Karzenowsiki et al. In one embodiment, the fusion proteins are ecdysone regulatable. In one embodiment, the fusion proteins are regulatable by a diacylhydrazine molecule or an analog thereof. In one embodiment, the chemical agent or ligand may be administered orally.

[0273] In one embodiment, the regulatable element when expressed may comprise a first fusion protein comprising a DNA-binding domain and an ecdysone receptor ligand binding domain; and a second fusion protein a transactivation domain and a chimeric RXR ligand binding domain comprising a vertebrate RXR amino acid sequence and an invertebrate RXR amino acid sequence, as described in U.S. Pat. No. 8,598,409, the contents of which is herein incorporated by reference in its entirety.

### Rapamycin Inducible Systems

[0274] In one embodiment, the regulatory-AAV particle may comprise one or more regulatable elements which imparts regulatable or tunable features to regulate the expression of a payload in the presence of a rapamycin inducible system. The rapamycin inducible system takes advantage of the dimerizing function of the antibiotic rapamycin, which links FK506-binding protein (FKBP) and FKBP12-rapamycin-associated protein (FRAP). FKBP contains the DNA-binding domain, such as ZFHD, while the activation domain of NF-κB p65 is fused to FRAP. The promoter containing the target DNA sequence is only induced when the two are dimerized by the action of rapamycin or alternative analogues (e.g. Kantor et al., and references therein). In one embodiment, the promoter may have a target sequence suitable for regulation through this system.

[0275] In one embodiment, the regulatable element when expressed may comprise a rapamycin regulatable element. In one embodiment, the regulatable element when expressed may comprise a rapamycin or rapamycin analog regulatable DNA binding domain fusion protein and a transactivation domain fusion protein, each of which comprise a rapamycin or analog binding domain. As a non-limiting example, the rapamycin or analog binding domain comprised in both the DNA binding domain fusion protein and transactivation domain fusion proteins may be FKBP (FK506-binding protein). FKBP is an abundant 12 kDa cytoplasmic protein that acts as the intracellular receptor for the immunosuppressive drugs FK506 and rapamycin. As described in US Publication No. US20130023033, the contents of which is herein incorporated by reference in its entirety, and references therein, one or more copies of FKBP may be fused to a DNA binding domain and a transactivation domain of a transcription factor. While not wishing to be bound by theory, they will dimerize upon addition of FK1012 (a homodimer of FK506).

[0276] As another non-limiting example, the rapamycin or analog binding domain in the DNA binding domain fusion protein and the activation domain fusion protein may be derived from two different proteins, allowing FK506 and rapamycin to promote heterodimerization. Without wishing to be bound by theory, heterodimerization more closely follows their natural mechanism of action.

[0277] Examples of dimerization domains/ligand binding domains useful in the rapamycin system include but are not limited to FKBP, calcineurin A, minimal calcineurin domain termed a CAB, and FRAP (mTOR, e.g., amino acids 2021-2113) as described in US Publication No. US20130023033, the contents of each of which is herein incorporated by reference in its entirety, and references therein. In some embodiments, the FRAP sequence may incorporate the single point-mutation Thr2098Leu (FRAP L) to allow use of certain nonimmunosuppressive rapamycin analogs (rapalogs).

[0278] In some embodiments, the dimerization domains/ligand binding domain may be N-terminal, C-terminal, or interspersed with respect to the DNA binding domain and activation domain. In some embodiments, the fusion proteins may comprise multiple copies of a dimerization domains/ligand binding domain, e.g. 2, 3 or 4 copies. The various domains of the fusion proteins may be connected to each other by linkers.

[0279] In some embodiments FRAP may be fused to a transactivator portion of human NF-κB p65 (190 amino acids) and FKBP may be fused to a ZFHD DNA binding domain as described in US Publication No. US20130023033, the contents of which is herein incorporated by reference in its entirety. In some embodiments the FKBP-ZFHD fusion protein may contain one, two, three, four or more copies of FKBP.

[0280] Suitable compounds for use in this system are disclosed in US Patent Publication No. US20130023033, incorporated herein by reference in its entirety, and references therein. Non-limiting examples of compounds include rapamycin, FK506, FK1012 (a homodimer of FK506), rapamycin analogs (“rapalogs”) which modified to add a “bump” that reduces or eliminates affinity for endogenous FKBP and/or FRAP, including, but not limited to, AP26113 (Ariad), AP1510, AP22660, AP22594, AP21370, AP22594, AP23054, AP1855, AP1856, AP1701, AP1861, AP1692 and AP1889.

[0281] In one embodiment, the regulatable element when expressed may comprise a chemically induced system as described in US Patent Publication No. US20130023033, the contents of which is herein incorporated by reference in its entirety. In one embodiment, the domains used in the present invention may be the domains of or derived from those described in US Publication No. US20130023033. In some embodiments the domains may be those or derived from the Ariad ARGENT® system as described in US Publication No. US20130023033, and references therein, including in U.S. Pat. No. 5,834,266 and U.S. Pat. No. 7,109,317, US Publication No. 20020173474, U.S. Publication No. 200910100535, U.S. Pat. No. 5,834,266, U.S. Pat. No. 7,109,317, U.S. Pat. No. 7,485,441, U.S. Pat. No. 5,830,462, U.S. Pat. No. 5,869,337, U.S. Pat. No. 5,871,753, U.S. Pat. No. 6,011,018, U.S. Pat. No. 6,043,082, U.S. Pat. No. 6,046,047, U.S. Pat. No. 6,063,625, U.S. Pat. No. 6,140,120, U.S. Pat. No. 6,165,787, U.S. Pat. No. 6,972,193, U.S. Pat. No. 6,326,166, U.S. Pat. No. 7,008,780, U.S. Pat. No. 6,133,456, U.S. Pat. No. 6,150,527, U.S. Pat. No. 6,506,379, U.S. Pat. No. 6,258,823, U.S. Pat. No. 6,693,189, U.S. Pat. No. 6,127,521, U.S. Pat. No. 6,150,137, U.S. Pat. No. 6,464,974, U.S. Pat. No. 6,509,152, U.S. Pat. No. 6,015,709, U.S. Pat. No. 6,117,680, U.S. Pat. No. 6,479,653, U.S. Pat. No. 6,187,757, U.S. Pat. No. 6,649,595, U.S. Pat. No. 6,984,635, U.S. Pat. No. 7,067,526, U.S. Pat. No. 7,196,192, U.S. Pat. No. 6,476,200, U.S. Pat. No. 6,492,106, WO199418347, WO199620951, WO199606097, WO199731898, WO199641865, WO199802441, WO199533052, WO1999110508, WO1999110510, WO199936553, WO199941258, WO2001114387, ARGENT™ Regulated Transcription Retrovirus Kit, Version 2.0 (9109102), and ARGENT™ Regulated Transcription Plasmid Kit, Version 2.0 (91 0902), each of which is incorporated herein by reference in its entirety.

[0282] In some embodiments, ligands for use in these inducible systems may be or be any of those described in U.S. Pat. No. 5,834,266 and U.S. Pat. No. 7,109,317, US Publication No. 20020173474, US Publication No. 200910100535, U.S. Pat. No. 5,834,266, U.S. Pat. No. 7,109,317, U.S. Pat. No. 7,485,441, U.S. Pat. No. 5,830,462, U.S. Pat. No. 5,869,337, U.S. Pat. No. 5,871,753, U.S. Pat. No. 6,011,018, U.S. Pat. No. 6,043,082, U.S. Pat. No. 6,046,047, U.S. Pat. No. 6,063,625, U.S. Pat. No. 6,140,120, U.S. Pat. No. 6,165,787, U.S. Pat. No. 6,972,193, U.S. Pat. No. 6,326,166, U.S. Pat. No. 7,008,780, U.S. Pat. No. 6,133,456, U.S. Pat. No. 6,150,527, U.S. Pat. No. 6,506,379, U.S. Pat. No. 6,258,823, U.S. Pat. No. 6,693,189, U.S. Pat. No. 6,127,521, U.S. Pat. No. 6,150,137, U.S. Pat. No. 6,464,974, U.S. Pat. No. 6,509,152, U.S. Pat. No. 6,015,709, U.S. Pat. No. 6,117,680, U.S. Pat. No. 6,479,653, U.S. Pat. No. 6,187,757, U.S. Pat. No. 6,649,595, U.S. Pat. No. 6,984,635, U.S. Pat. No. 7,067,526, U.S. Pat. No. 7,196,192, U.S. Pat. No. 6,476,200, U.S. Pat. No. 6,492,106, International Publication No. WO199418347, International Publication No. WO199620951, International Publication No. WO199606097, International Publication No. WO199731898, International Publication No. WO199641865, International Publication No. WO199802441, International Publication No. WO199533052, International Publication No. WO1999110508, International Publication No. WO1999110510, International Publication No. WO199936553, International Publication No. WO199941258, International Publication No. WO2001114387, the contents of each of which is incorporated herein by reference in its entirety.

[0283] In one embodiment, the regulatable element when expressed may comprise a first fusion protein and a second fusion protein, which both contain a dimerization domain and can be induced to associate with each other through binding of a ligand. In one embodiment, the first and second fusion protein may be any of those described in U.S. Pat. No. 6,165,787, U.S. Pat. No. 6,011,018, U.S. Pat. No. 5,869,337, US Publication No. US20090060888, U.S. Pat. No. 6,046,047, European Publication No. EP1978095, European Publication No. EP0804561, U.S. Pat. No. 6,140,120 and U.S. Pat. No. 6,063,625, the contents of each of which is herein incorporated by reference in its entirety. In one embodiment, the ligand may be any of the ligands described in U.S. Pat. No. 6,165,787, U.S. Pat. No. 6,011,018, U.S. Pat. No. 5,869,337, US Publication No. US20090060888, U.S. Pat. No. 6,046,047, European Publication No. EP1978095, European Publication No. EP0804561, U.S. Pat. No. 6,140,120 and U.S. Pat. No. 6,063,625, the contents of each of which are herein incorporated by reference in its entirety.

[0284] In one embodiment, the regulatable element when expressed may comprise a rapamycin analog AP21967 regulatable transcription factor as described in International Publication No. WO2006063247, the contents of which is herein incorporated by reference in its entirety. In one embodiment, the payload may comprise a therapy for a neurological disorder.

[0285] In one embodiment, the viral genome comprises a promoter which may be inducible through a rapamycin inducible system, wherein the two rapamycin inducible fusion proteins of the regulatable element are under control of a tissue specific promoter. Such a system is for example described in Chen et al., 2013 (Hum Gene Ther Methods. 2013 August; 24(4): 270-278. Enhancing the Utility of Adeno-Associated Virus Gene Transfer through Inducible Tissue-Specific Expression), in which the transcription factor domains under the control of either a heart-specific promoter (cardiac troponin T, cTnT) or a liver-specific promoter (thyroxine-binding globulin, TBG).

### Light Inducible Systems

[0286] In one embodiment, the regulatory-AAV particle may comprise one or more regulatable elements which imparts regulatable or tunable features to regulate the expression of a payload encoding dimerizable fusion proteins in the presence of a light stimulus.

[0287] In one embodiment, the regulatable element when expressed may comprise a DNA binding fusion protein and a transactivating fusion protein, both of which comprise a light inducible dimerization domain. Any of the light inducible domains described in Jinek et al., A programmable dual-RNA-guided DNA endonuclease in adaptive bacterial immunity. 2012 Aug. 17; 337(6096):816-21, the contents of which is herein incorporated by reference in its entirety, may be used.

### Modified Fusion Proteins

[0288] In one embodiment, the regulatory-AAV particle may comprise one or more regulatable elements which imparts regulatable or tunable features to regulate the expression of a payload encoding modified fusion proteins. Fusion proteins can be modified, e.g. in their ligand binding domains or novel fusion proteins can be developed with new binding specificities, according to methods well known in the art. Dimerization domains and ligands or compounds that bind to them may be readily identified using methods and compound characteristics known in the art, for example, described in US Publication No. US20130023033, the contents of which is herein incorporated by reference in its entirety. The design of fusion proteins for modulation of gene expression, has been described, for example in Salis and Kaznessis; Phys Biol. 2006 Dec. 22; 3(4):295-310. “Computer-aided design of modular protein devices: Boolean AND gene activation.” Techniques for the creation of novel fusion proteins are well known in the art, for example as described in Zhu et al., BioTechniques, Vol. 43, No. 3, September 2007, pp. 354-359, the contents of which is herein incorporated by reference in its entirety.

[0289] Chemical libraries of ligands can be panned against these modified or new fusion receptors to identify new ligands with the desired binding affinities. These ligands can then be tested for their physical and pharmacological properties (e.g., affinity, biodistribution, toxicology, half-life, etc.).

[0290] In addition, fusion proteins should be extensively tested to ensure their binding specificity and to avoid off-target effects. The DNA binding domain, and the corresponding fusion protein should bind to DNA sequence element with specificity and affinity as compared to other sequences, such as host genomic sequences. This means that the DNA binding domain binds much more strongly to the response element than to any other sequence presented in in vitro binding studies.

### Regulatable Elements: Endonucleases, Recombinases and Restriction Enzymes

[0291] In one embodiment, the regulatable-AAV particle comprises at least one regulatable element that when expressed may comprise an enzyme.

[0292] In some embodiments, the regulatable element when expressed comprises an enzyme such as an endonuclease, recombinase, restriction enzyme or related enzyme which can function to turn off payload expression. For example, the enzyme may comprise a meganuclease, a zinc finger nuclease, a recombinase, an integrase, a TALEN, CRISPR Cas9 enzyme or a restriction enzyme specific to a sequence that rarely occurs in the human genome.

[0293] In one embodiment, the viral genome may comprise one or more recognition sites specific to the endonuclease or recombinase encoded by the regulatable element, such that expression of the payload can be turned off upon expression of the regulatable element. Such one or more recognition sites may be located in or may be flanking one or more regions of the payload construct. As used herein, “payload construct regions” include the 5′ITR, the region downstream of the 5′ITR and upstream of the promoter, the promoter, the 5′UTR (which is located 3′ of the promoter and 5′ of the coding sequence), the coding sequence, the payload 3′UTR (which is located 3′ of the coding sequence and 5′ of the ITR and which optionally comprises a polyadenylation site), the region downstream of the 3′UTR and upstream of the 3′ITR, and the 3′ITR.

[0294] In one embodiment, the one or more sites may be located in the promoter region. In another embodiment, the one or more recognition sites may be located within the coding region. In another embodiment, the one or more recognition sites may be located in the 5′UTR region. In another embodiment, the one or more recognition sites may be located within the 3′UTR region. In another embodiment, the one or more recognition sites may be located in a region 3′ of the 5′ITR and 5′ of the promoter. In another embodiment, the one or more recognition sites may be located in a region 3′ of the 3′ UTR and 5′ of the 3′ ITR. The locations of the one or more recognition sites are not limited to any particular position within each of these regions and can be at any position within the regions, i.e., at the 5′ end, and the 3′ end or in the middle of a region.

[0295] In one embodiment, two or more different types of recognition sites may be present within or flanking any of the regions of the payload construct. In a non-limiting example, these sites may be recognized by different enzymes or fusion proteins. In a non-limiting example, these sites may be recognized by two or more different types of recombinases and may be in the same or in a different orientation. In another non-limiting example, these sites may be recognized by two or more different single guide RNAs (sgRNAs).

[0296] In some embodiments, the regulatable-AAV particle comprises a regulatable element that when expressed may comprise at least one enzyme which may be a chimeric enzyme or fusion protein, wherein the nuclease has at least two domains comprising a sequence specific DNA binding domain and a catalytic domain. In one embodiment, these are expressed independently of each other and are on separate polypeptide chains. In one embodiment, heterodimerization is inducible, e.g. through ligand binding or a physiological stimulus. In another embodiment, the at least two domains are on one polypeptide chain. The polypeptide chains can be arranged in various ways such that the domains may be N terminal or C terminal with respect to each other, and may be encoded upstream or downstream of each other.

[0297] The enzymes must be extensively tested to ensure their binding specificity and avoid off-target effects, according to methods know in the art. The DNA binding domain should bind to the appropriate DNA sequence element, e.g., within the payload construct, with specificity and affinity as compared to other sequences, such as host genomic sequences. This means that the DNA binding domain binds much more strongly to the response element than to any other sequence presented in in vitro binding studies.

[0298] In one embodiment, an inducible promoter drives the expression of the regulatable element encoding one or more enzymes or fusion proteins. As a non-limiting example, any of the regulatable elements described herein may be useful in regulating the enzyme. In another embodiment, the promoter of the regulatable element encoding the one or more enzymes drives tissue specific expression, such that the regulatable element is only expressed in certain tissues.

[0299] In one embodiment, a constitutive promoter drives the expression of the regulatable element encoding the endonuclease.

### CRE/LoxP Recombinase and CRE/LOXP System

[0300] In one embodiment, the regulatable-AAV particle comprises at least one regulatable element that when expressed may comprise a CRE/Lox recombinase. In one embodiment, the viral genome may comprise one or more CRE/Lox regulatable elements, i.e., Lox sites. In one embodiment, the viral genome may comprise two Lox sites. In some embodiment, the viral genome may comprise 2, 3, 4, 5, 6 or more Lox sites.

[0301] In some embodiments, the recombinase recognition sites may be LoxP sites. In some embodiments, variant LoxP sequences, for example Lox2272 and LoxN may also be used. Lox variants are known in the art and are for example described in Missirlis et al. (A high-throughput screen identifying sequence and promiscuity characteristics of the LoxP spacer region in Cre-mediated recombination, BMC Genomics. 2006; 7: 73), the contents of which is herein incorporated by reference in its entirety.

[0302] In some embodiments herein, there may be at least one pair of identical Lox sequences in the viral genome. While not wishing to be bound by theory, Cre recombinase typically cannot induce recombination between a pair of non-identical Lox sites, so that a pair of identical Lox sites (e.g. two LoxP sites, or two Lox2272 sites) must be present for recombination to occur.

[0303] The Cre recombinase recognizes 34 bp LoxP sites, whose orientation and location relative to each other determine the way in which the genetic material is rearranged. If the LoxP sites are in opposite orientation to each other on the same DNA strand, recombination results in the inversion of the DNA in between the two sites. If the sites are in the same orientation, the recombination event will result in a deletion; this orientation results in the excision of the sequence as a circular DNA. If the sites are not on the same DNA strand, the recombination will result in a translocation at the LoxP sites.

[0304] In one embodiment, the LoxP sites may be in opposite orientation relative to each other on the same DNA strand. In one embodiment, the LoxP sites may be in the same orientation relative to each other on the same DNA strand. Without wishing to be bound by theory, expression of the CRE recombinase will result in inversion or in excision of the region or part of a region which is flanked by the recognition sites. This region may be, but is not limited to, the coding region or any other region of the viral genome.

[0305] In one embodiment, the payload may be irreversibly turned off. In another embodiment, the recombination event may be reversible.

[0306] In one embodiment of the present invention, the payload construct may comprise two or more LoxP sites located in or flanking one or more payload construct regions. These regions include the 5′ITR region, the region downstream of the 5′ITR and upstream of the promoter, the promoter region, the 5′UTR region, the coding region, the 3′UTR region, the region downstream of the 3′UTR and upstream of the 3′ITR, and the 3′ITR region.

[0307] In one embodiment, the two or more LoxP sites may flank two or more regions. In one embodiment, the two or more LoxP site may be comprised within one region. In one embodiment, the two or more LoxP sites may be positioned within more than one region. The two or more LoxP sites may be located at any position within any of the regions, i.e., at the 5′ end, and the 3′ end or in the middle of a region. In some aspects, the two or more LoxP sites may flank certain regulatable elements located within a certain region or across one or more regions. In some aspects, the two or more LoxP sites may flank the coding sequence or a part thereof.

[0308] As a non-limiting example, the payload construct may comprise two sites, each of which is located in a different region. In another non-limiting example, the payload construct may comprise two sites and the two LoxP sites may flank one or more regions. In another non liming example, the payload construct may comprise two sites, which are both located in one region. In one embodiment, the payload construct comprises only one recognition site.

[0309] Non-limiting examples of constructs with recombinase recognition sites are described in US20140127162, the contents of which is herein incorporated by reference in its entirety.

[0310] In one embodiment, the payload construct may comprise a synthetic intron flanked on the 5′ end by a splice donor site and on the 3′ end by a splice acceptor site. In one embodiment, the synthetic intron may be located in the promoter. In one embodiment, the synthetic intron within the promoter may comprise an enhancer element. In a non-limiting example, the enhancer element may be a UBC enhancer. In one embodiment, the splice donor sites and the splice acceptor sites may each be flanked on both sides by a recombinase recognition site, including but not limited to LoxP. In one embodiment, all four recombinase recognition sites are in the same orientation. In one embodiment the promoter may be a modified CAS1 promoter, comprising, from 5′ to 3′, a CMV enhancer fragment, beta-actin promoter fragment, a splice donor, a UBC enhancer fragment, a splice acceptor, in which a first pair of LoxP sites flank the splice donor, and a second pair of LoxP site flank the splice acceptor, and in which all four of the LoxP sites are in the same orientation, as described in US Publication No. US20140127162, the contents of which is herein incorporated by reference in its entirety.

[0311] In one embodiment, a recombinase recognition site may be located in the 3′UTR region. The 3′UTR region may comprise one or more posttranscriptional regulatable elements, such as woodchuck hepatitis virus posttranscriptional regulatable elements (WPRE), hepatitis B virus posttranscriptional regulatable elements HBV/PRE, or RNA transport elements (RTE) or variants thereof. The posttranscriptional regulatable element may be flanked on each side by a recombinase recognition site, as described in US Publication No. US20140127162, the contents of which is herein incorporated by reference in its entirety. Alternatively, the posttranscriptional regulatable element, such as a WPRE, may comprise one or more recombinase recognition sites. The 3′UTR may further comprise a polyadenylation site, including but not limited to the SV40 polyadenylation site. The polyadenylation site may be flanked by two recombinase recognition sites or may comprise one or more recognition sites, as described in US Publication No. US20140127162. In one embodiment, the payload construct may comprise a first recombinase recognition site downstream (or 3′) of the first ITR, and upstream (or 5′) of the 3′ end of promoter and a second recombinase recognition site positioned downstream (3′) of the 5′ end of the promoter and a third recombinase recognition site positioned downstream (or 3′) of the payload and upstream (or 5′) of a second ITR. All three of the recombinase sites may be oriented in the same direction. In another embodiment, the payload construct may also include a WPRE in the 3′ UTR and a fourth recombinase recognition site positioned upstream (or 5′) of a 3′ end of the WPRE. In another embodiment, the payload construct may include a fifth recombinase recognition site positioned downstream (or 3′) of a 5′ end of the WPRE. In another embodiment, the payload construct may also include a sixth recombinase recognition site positioned downstream (or 3′) of the WPRE and upstream (or 5′) of the second ITR. In one aspect, all six recombinase target sites may all be oriented in the same direction. In some embodiments the WPRE is a short WPRE as described in US Publication No. US20140127162.

[0312] In some embodiments, the payload construct may comprise recombinase recognition sites in different orientations. In a non-limiting example, two or more of a first recombinase target site are oriented in a first orientation, and two or more of a different, second recombinase recognition site are oriented in a second orientation, such that recombination events cannot be induced between the first and second sites. In some embodiments, two or more of a first recombinase recognition site (e.g., a LoxP site) are oriented in one direction flanking a first sequence, and two or more of a second, different, recombinase recognition site (e.g., an FRT site, the target recognition site for the FLP recombinase) are oriented in the other direction, flanking a second sequence. Without wishing to be bound by theory, CRE would then induce recombination between the LoxP sites to excise the first sequence, while the addition of FLP would induce recombination between the FRT sites to excise the second sequence.

[0313] In one embodiment, the payload construct may comprise any of the regulatory sequences comprised in the vectors described in US Publication No. US20140127162, the contents of which is herein incorporated by reference in its entirety.

[0314] In one embodiment, the payload expression may be induced by a regulatable element comprising a recombinase. In one embodiment, the payload construct may comprise a stop cassette element. The stop cassette element may be located within or in between one or more of the payload construct regions. In one embodiment, the stop cassette element may be constructed of the elements described in US Publication No. US20150020223, the contents of which is herein incorporated by reference in its entirety. In one embodiment, the stop cassette element may be located between the promoter and the coding sequence. In one embodiment, the stop cassette element may be LoxP-SV40 polyA x3-LoxP. Without being bound by theory, the CRE recombinase may excise the stop cassette element and induce transcription of the payload. In one embodiment, a viral genome comprises a promoter which may comprise a stop cassette element. In a non-limiting example, the stop cassette element located in the promoter may be the one described in US Publication No. US20150020223, the contents of which is herein incorporated by reference in its entirety. In one embodiment, the viral genome comprises a promoter which comprises a stop cassette element may drive the expression of a Cas9 and/or single guide RNA (sgRNA).

[0315] In one embodiment, the expression of CRE recombinase may be under control of a constitutive promoter. In one embodiment, the expression of CRE recombinase may be under control of an inducible promoter. Non-limiting examples of inducible systems that may govern the expression of CRE recombinase are described herein. In a non-limiting example, the promoter driving expression of the CRE recombinase may be inducible by a rapamycin inducible system as described herein. In one embodiment, the CRE regulatable element of the invention may comprise a pharmacologically induced transgene ablation system as described in US Publication No. US20130023033, the contents of which is herein incorporated by reference in its entirety. In another embodiment, the CRE recombinase may be under control of a tissue specific promoter.

[0316] In one embodiment, the CRE recombinase may be an inducible fusion protein also containing a ligand binding domain. Non-limiting examples are described in Jaisser at al. (Jaisser, F. Inducible gene expression and gene modification in transgenic mice. J. Am. Soc. Nephrol. 11 (suppl. 1),595-S100(2000)), the contents of which is herein incorporated by reference in its entirety. In some embodiments, the ligand binding domain may be mutated so as not to be induced by the endogenous ligand. In a non-limiting example, the CRE recombinase may be a CRE recombinase fusion with the estrogen ligand-binding domain, which may be active only upon induction by tamoxifen and not endogenous circulating estrogens, as described in Metzger D, Clifford J, Chiba H, Chambon P: Conditional site-specific recombination in mammalian cells using a ligand-dependent chimeric Cre recombinase. Proc Natl Acad Sci USA 92: 6991-6995,1995, the contents of which is herein incorporated by reference in its entirety.

### FLP/FRT System

[0317] In one embodiment, the regulatable-AAV particle comprises at least one regulatable element that when expressed may comprise a FLP recombinase. The FLP/FRT system is analogous to the CRE/Lox recombination system. The targets of the FLP recombinase are the two FLP recognition target sites (FRT) and the recombination events that can occur are the same as those described above for CRE/Lox.

[0318] In one embodiment of the present invention, the payload construct may comprise two or more FRT sites located within a payload construct region. These regions include, but are not limited to, the 5′ITR region, the region downstream of the 5′ITR and upstream of the promoter, the promoter region, the 5′UTR region, the coding region, the 3′UTR region, the region downstream of the 3′UTR and upstream of the 3′ITR, and the 3′ITR region.

[0319] In one embodiment, the FRT sites may be in opposite orientation to each other on the same DNA strand. In one embodiment, the FRT sites may be in the same orientation on the same DNA strand. Without wishing to be bound by theory, expression of the FLP recombinase may result in inversion or in excision of the region flanked by the FLP sites from the payload construct. In one embodiment, the payload expression may be irreversibly turned off. In another embodiment, the recombination event may be reversible.

[0320] In one embodiment, the two or more FRT sites may flank two or more regions. In one embodiment, the two or more FRT site may be comprised within one region. In one embodiment, the two or more FRT sites may be positioned within more than one region. The two or more FRT sites may be located at any position within any of the regions, i.e., at the 5′ end, and the 3′ end or in the middle of a region. In some aspects, the two or more FRT sites may flank certain regulatable elements located within a certain region or across one or more regions. In some aspects, the two or more FRT sites may flank the payload coding sequence or a part thereof.

[0321] Non-limiting examples of constructs with recombinase recognition sites which can be used with the FLP/FRT system are described above for the CRE/LOXP system. Exemplary constructs are also described in US20140127162 and US20130023033, the contents of each of which are herein incorporated by reference in their entirety.

[0322] In one embodiment, the expression of FLP recombinase may be under control of a constitutive promoter.

[0323] In one embodiment, the expression of FLP recombinase may be under control of an inducible promoter. Non-limiting examples of inducible systems that may govern the expression of FLP recombinase are described herein. In one embodiment, the FLP regulatable element of the invention may comprise a pharmacologically induced transgene ablation system as described in US Publication No. US20130023033, the contents of which is herein incorporated by reference in its entirety.

[0324] In another embodiment, the FLP recombinase may be under control of a tissue specific promoter.

[0325] In one embodiment, the payload expression may be induced by a regulatable element comprising a FLP recombinase. In one embodiment, the payload construct may comprise a stop cassette element positioned within or in between one or more of the payload construct regions. In one embodiment the stop cassette element is located between the promoter and the coding sequence. Similar as described supra for CRE recombinase, FLT recombinase may excise the stop cassette element, including but not limited to the stop cassette element described in US Publication No. US20150020223, the contents of which is herein incorporated by reference in its entirety, and induce transcription. In one embodiment, a viral genome comprises a promoter which may comprise a stop cassette element.

[0326] In one embodiment, the FLP recombinase may comprise a ligand binding domain and may be inducible through a ligand.

### Serine Integrases

[0327] In one embodiment, the regulatable-AAV particle comprises at least one regulatable element that when expressed may comprise a serine integrase, such as, but not limited to, ΦC31. The phiC31 integrase is a sequence-specific recombinase encoded within the genome of the bacteriophage phiC31. The phiC31 integrase mediates recombination between two 34 base pair sequences, one found in the phage and the other in the bacterial host and can function in many cell types including mammalian cells.

[0328] In one embodiment, the payload construct may comprise two or more DC31 recognition sequences within one or more payload construct regions. These regions include the 5′ITR region, the region downstream of the 5′ITR and upstream of the promoter, the promoter region, the 5′UTR region, the coding region, the 3′UTR region, the region downstream of the 3′UTR and upstream of the 3′ITR, and the 3′ITR region.

[0329] In one embodiment, the two or more ΦC31 sites may flank two or more regions. In one embodiment, the two or more ΦC31 sites may be comprised within one region. In one embodiment, the two or more ΦC31 sites may be positioned within more than one region. The two or more FRT sites may be located at any position within any of the regions, i.e., at the 5′ end, and the 3′ end or in the middle of a region. In some aspects, the two or more DC31 sites may flank certain regulatable elements located within a certain region or across one or more regions. In some aspects, the two or more ΦC31 sites may flank the coding sequence or a part thereof.

[0330] Non-limiting examples of constructs with recombinase recognition sites which can be used with an integrase system such as the DC31 system are described above for the CRE/LOXP system. Exemplary constructs are also described in US20140127162 and US20130023033, the contents of each of which is herein incorporated by reference in its entirety.

[0331] In one embodiment, the payload expression will be irreversibly turned off. In another embodiment, the recombination event is reversible.

[0332] In one embodiment, the expression of ΦC31 integrase is under control of a constitutive promoter.

[0333] In one embodiment, the expression of ΦC31 integrase is under control of an inducible promoter. Non-limiting examples of inducible systems that may govern the expression of ΦC31 integrase are described herein. In one embodiment, the integrase regulatable element of the invention may comprise a pharmacologically induced transgene ablation system as described in US Publication No. US20130023033, the contents of which is herein incorporated by reference in its entirety.

[0334] In another embodiment, the integrase may be under control of a tissue specific promoter.

### Zinc Finger Nucleases, TALENs, and Meganucleases

[0335] In one embodiment, the regulatable-AAV particle comprises at least one regulatable element that when expressed may comprise a protein or fusion protein such as, but not limited to, zinc finger nucleases, TALENS, and meganucleases. Zinc finger nucleases are artificial restriction enzymes generated by fusing a zinc finger DNA-binding domain to a DNA-cleavage domain. Zinc finger domains can be engineered to target specific desired DNA sequences and this enables zinc-finger nucleases to target unique sequences.

[0336] Transcription activator-like effector nucleases (TALENs) are artificial restriction enzymes generated by fusing a TAL effector DNA-binding domain to a DNA cleavage domain (FokI cleavage domain). In their natural context, TAL effector proteins are secreted by bacteria and bind promoter sequences in the host plant and activate the expression of plant genes that aid bacterial infection. TAL effector proteins DNA binding domains contain variable numbers of amino acid sequence repeats. There is a simple relationship between the identity of two hypervariable amino acid residues in the DNA and sequential DNA bases in the TAL effector's target site, a circumstance, which has been extensively used to design artificial custom TAL effectors domains capable of recognizing new DNA sequences in other hosts. Novel restriction enzyme and novel transcription factor fusion proteins have been created using the TAL effector DNA binding domain.

[0337] Meganucleases are endodeoxyribonucleases characterized by a large recognition site (double-stranded DNA sequences of 12 to 40 base pairs); for example, I-Scel recognizes a specific asymmetric 18 bp element (TAGGGATAACAGGGTAAT (SEQ ID NO: 570) and creates double strand breaks, as described in US Publication No. US20130023033, the contents of which is herein incorporated by reference in its entirety, and references therein.

[0338] TALENs, zinc finger nucleases and meganucleases are contemplated in the instant invention as regulators of payload expression. In a non-limiting example, the payload construct may comprise at least one recognition sequence for a TALEN, Zinc finger nuclease or meganuclease. Regions in which the recognition sequences may be located include the 5′ITR region, the region downstream of the 5′ITR and upstream of the promoter, the promoter region, the 5′UTR region, the coding region, the 3′UTR region, the region downstream of the 3′UTR and upstream of the 3′ITR, and the 3′ITR region.

[0339] Methods of designing the enzymes and their recognition sites so that they do not recognize other genomic sequences in the cell are well known in the art.

[0340] In one embodiment, the payload construct comprises at least one recognition sequence that may be recognized and cleaved by a zinc finger nuclease, TALEN or meganuclease. In one embodiment, this recognition sequence is specific. In one embodiment, the payload expression will be irreversibly turned off.

[0341] In one embodiment, the expression of zinc finger nuclease, TALEN or meganuclease is under control of a constitutive promoter.

[0342] In one embodiment, the expression of zinc finger nuclease, a TALEN or meganuclease is under control of an inducible promoter. Non-limiting examples of inducible systems that may govern the expression of zinc finger nuclease, TALEN or meganuclease are described supra herein. In one embodiment, the endonuclease regulatable element of the invention may comprise a pharmacologically induced transgene ablation system as described in US Publication No. US20130023033, the contents of which is herein incorporated by reference in its entirety.

[0343] In another embodiment, the TALEN or meganuclease may be under control of a tissue specific promoter.

### CRISPR

[0344] The CRISPR (Clustered Regularly Interspersed Short Palindromic Repeats) system functions as an adaptive immune response defense in the genomes of several bacteria and Archaea.

[0345] In bacteria, CRISPR, along with CRISPR-associated or cas genes, function in association with non-coding RNAs to recognize and destroy foreign DNA and to ensure survival against subsequent invasions by a similar pathogen, whether a virus or plasmid. Three types of CRISPR systems have been identified in bacteria with the Type II system being the most widely explored.

[0346] The Type II natural RNA-guided DNA nuclease system includes the Cas9 nuclease (also known as Csn1 and formerly known as Cas5) and two small RNAs known as “crRNA” or CRISPR RNA and “tracrRNA” or trans-activating CRISPR RNA. Both are processed from the clustered repeats encoded in the bacterial host genome. The type II CRISPR system requires both the crRNA and the tracrRNA to be functional. In this system, the crRNA associates with the cas9 endonuclease and acts as a hybridization strand providing localization to the complementary target DNA while the tracrRNA associates with the crRNA through partial hybridization and has been shown to be necessary for Cas9 complex binding to the target dsDNA. Once associated with the target dsDNA site, the cas9 enzyme cleaves both strands of the dsDNA thereby destroying the invading organism.

[0347] The Type II system is exemplified by the systems found in Streptococcus pyogens and Streptococcus thermophilus. Here the effector complex involves a single Cas9 protein. Early studies of CRISPR-dependent immunity in Streptococcus thermophilus were performed by Barrangou and colleagues (Barrangou et al., Science; 2007; 315:1709-12; Horvath and Barrangou, Science, 2010; 327:167-170). In the S. thermophilus strain, the tracrRNA of approximately 65 nucleotides co-purifies with the Cas9 protein and a 42 nucleotide crRNA (Karvelis et al., RNA Biology, 2013; 10:5: 841-851). Sapranauskas et al. demonstrated the transfer of the S. thermophilus CRISPR3/Cas system into E. coli and that this transfer could provide protection against plasmid transformation. It was also shown that the protection was sequence specific (NAR, 2011; 39(21): 9275-9282).

[0348] Studies of the maturation process of the crRNA and tracrRNA in S. pyogens illustrated the necessity of the tracrRNA for maturation of the functional complex and the involvement of an RNase III (Deltcheva, et al., Nature, 2011; 471:602-607). The work of Deltcheva et al. led to the work of Jinek, et al. (Science, 2012; 337:816-821) showing that the crRNA and tracrRNA could be combined into one chimeric RNA molecule to produce a functional ribonucleoprotein complex which could cleave a plasmid or oligonucleotide duplex bearing the required protospacer and PAM. Jinek et al. showed that each Cas9 domain cleaved only one strand of the dsDNA duplex and that point mutations in conserved catalytic amino acids of the two domains (D10A and H840A) resulted in the determination that the HNH domain (mutation H840A) cleaves the strand complementary to the crRNA (or template strand) while the RuvC-like domain (mutation D10A) cleaves the non-complementary or displaced strand (or non-template strand) which comprises the protospacer.

[0349] It has since been discovered that Type II CRISPR nuclease-guided cleavage of dsDNA can be reprogrammed to work in higher organism by providing a Cas9 enzyme and altering the features of the two small RNAs associated with the Cas enzyme. In higher organisms such as in mammalian cells, targeting and cleavage of the endogenous or genomic dsDNA triggers the cell's natural repair mechanisms through either non-homologous end joining (NHEJ) or homology directed repair (HDR) pathways, thereby editing the target genomic site.

[0350] This observation inspired a series of studies exploring the requirements of tracrRNA size, DNA binding and hybridization, mutant Cas9 enzymes, delivery of the enzyme and RNA molecules to mammalian cells, localization to the nucleus, off-target effects, the specificity of genome editing and multiplexing target sites (Karvelis et al., RNA Biology, 2013; 10:5; 841-851; Gasiunas et al., PNAS, USA 2012; 109:E2579-E2586; Cong et al., Science, 2013; 339: 819-823; Mali, et al., Science; 2013; 339: 823-826; Hwang et al., Nat. Biotechnol., 2013; doi 10.1038/nbt.2501; Cho et al., Nat. Biotechnol., 2013; doi 10.1038/nbt.2507; Jiang et al., Nat. Biotechnol., 2013; 31; 233-241; Fu et al., Nat. Biotechnol. 2013; doi: 10.1038/nbt2623; and Chylinski et al., RNA Biology; 2013; 10:5; 726-737).

[0351] The use of the CRISPR/Cas9 system in mice has been studied by Shen and Wang et al., (Cell, 2013; 153:910-918). Shen et al. targeted a GFP transgene in the mouse genome by administering a Cas9 mRNA and pre-annealed crRNA-tracrRNA chimera to mouse embryos. They showed site specific cleavage in a chromosomal locus. Wang et al. explored triggering homologous recombination in the mouse and utilized a Cas9 mRNA and chimeric crRNA-tracrRNA. In these studies, conversion of an EcoRV site to an EcoRI restriction sites was successful upon a two base pair insertion. Still neither group demonstrated insertion of a larger polynucleotide.

[0352] Cleavage deficient Cas9 enzymes of Streptococcus pyogens and S. thermophilus have been explored further by Sapranauskas et al., (NAR, 2011; 39(21); 9275-9282), Qi et al., (Cell, 2013; 152:1173-1183) and Bikard et al., (NAR, 2013; 1-9) where the effects on transcription modulation including upregulation and silencing were investigated.

[0353] Studies in organisms other than bacteria include those in yeast (DiCarlo et al., NAR; 2013; 41:4336-4343), Drosophila (Gratz; Yu et al., Genetics, 2013; doi10.1534/genetics.113.153825) and Zebrafish (Hwang et al., Nat. Biotechnol. Doi 10.1038/nbt.2501).

[0354] CRISPR/Cas9 is an RNA-guided DNA endonuclease enzyme and target specificity stems from the guide RNA. Certain CRISPR based methods can be used to control the copies and residence time of a gene product delivered in host human cells.

[0355] In embodiments, the regulatable-AAV particles may comprise one or more CRISPR regulatable elements. Such regulatable-AAV particles may be termed “CRISPR-AAV particles.” As used herein, a “CRISPR regulatable element” includes any component of a CRISPR system including but not limited to a Cas9, Cas9 related nucleases, or Cas9-fusion proteins, one or more sgRNA (small guide RNAs), one or more tracrRNAs and/or other polynucleotide feature or motif which imparts regulatable or tunable features to a viral genome encoding them.

[0356] CRISPR-AAV particles may be designed for gene knockdown or for gene replacement (resulting in e.g., activation, initiation, and increased expression).

[0357] In an embodiment contemplated by the current invention, a CRISPR regulatable element may selectively disrupt fragments of a regulatable-AAV particle. Upon delivery, a CRISPR regulatable element comprising Cas9 and a custom RNA sequence for guidance of Cas9 may cleave the payload construct or viral genome at a strategically placed target site, thereby inactivating the payload.

[0358] In some embodiments, the cas9 protein or nuclease is the CRISPR regulatable element and may be selected from any of the known or putative Streptococcus cas9 enzymes in the Uniprot cluster and listed in Table 4. Such proteins, if they are to be delivered as a nucleic acid such as an encoded mRNA and expressed in an organism other than Streptococcus, may be codon optimized for expression in the recipient cell or organism.

TABLE 4
Cas 9 proteins of Streptococcus sp.

| Uniprot | | | SEQ ID |
|---|---|---|---|
| Entry | Protein name | Organism | NO |
| Q03JI6 | CRISPR-associated endonuclease Cas9 | Streptococcus thermophilus (strain | 571 |
| | 2 (EC 3.1.—.—) | ATCC BAA-491/LMD-9) | |
| Q99ZW2 | CRISPR-associated endonuclease | Streptococcus pyogenes serotype M1 | 572 |
| | Cas9/Csn1 (EC 3.1.—.—) | | |
| G3ECR1 | CRISPR-associated endonuclease Cas9 | Streptococcus thermophilus | 573 |
| | (EC 3.1.—.—) | | |
| J3JPT0 | CRISPR-associated protein csn1 | Streptococcus ratti FA-1 = DSM 20564 | 574 |
| | (Uncharacterized protein) | | |
| I5BLK7 | Uncharacterized protein | Streptococcus agalactiae ZQ0910 | 575 |
| K4Q9P5 | Uncharacterized protein | Streptococcus dysgalactiae subsp. | 576 |
| | | equisimilis AC-2713 | |
| Q3D2H4 | Reticulocyte binding protein | Streptococcus agalactiae H36B | 577 |
| M2GS30 | Uncharacterized protein | Streptococcus mutans A19 | 578 |
| Q3DG33 | Reticulocyte binding protein | Streptococcus agalactiae CJB111 | 579 |
| M1YDU0 | Uncharacterized protein | Streptococcus agalactiae LADL-90-503 | 580 |
| M7DS80 | Uncharacterized protein | Streptococcus mutans ATCC 25175 | 581 |
| M7DAQ6 | Uncharacterized protein | Streptococcus mutans KK23 | 582 |
| M2KYB4 | Uncharacterized protein | Streptococcus mutans S1B | 583 |
| I0Q2W2 | CRISPR-associated protein Cas9/Csn1, | Streptococcus oralis SK610 | 584 |
| | subtype II/NMEMI | | |
| Q3DN68 | Reticulocyte binding protein | Streptococcus agalactiae 515 | 585 |
| E9FPR9 | CRISPR-associated protein, Csn1 | Streptococcus sp. M334 | 586 |
| | family | | |
| F5U0T2 | CRISPR-associated protein, Csn1 | Streptococcus anginosus SK52 = DSM | 587 |
| | family | 20563 | |
| H8HE09 | CRISPR-associated protein Csn1 | Streptococcus pyogenes MGAS1882 | 588 |
| M2E8A3 | Uncharacterized protein | Streptococcus mutans 8ID3 | 589 |
| Q3DAP7 | Reticulocyte binding protein | Streptococcus agalactiae COH1 | 590 |
| J7TMY5 | Putative cytosolic protein | Streptococcus salivarius K12 | 591 |
| F2C4I5 | Csn1 family CRISPR-associated protein | Streptococcus sanguinis SK330 | 592 |
| F9HIG7 | CRISPR-associated protein Cas9/Csn1, | Streptococcus sp. oral taxon 056 str. | 593 |
| | subtype II/NMEMI | F0418 | |
| E0PL18 | Csn1 family CRISPR-associated protein | Streptococcus gallolyticus subsp. | 594 |
| | | gallolyticus TX20005 | |
| M4YX12 | CRISPR-associated protein | Streptococcus dysgalactiae subsp. | 595 |
| | | equisimilis RE378 | |
| M1XVB4 | Uncharacterized protein | Streptococcus agalactiae SS1219 | 596 |
| M7E3Z6 | CRISPR-associated protein csn1 | Streptococcus mutans NCTC 11060 | 597 |
| M2ECS5 | Uncharacterized protein | Streptococcus mutans 4SM1 | 598 |
| F0I6Z8 | Csn1 family CRISPR-associated protein | Streptococcus sanguinis SK115 | 599 |
| M2FSD0 | Uncharacterized protein | Streptococcus mutans 2VS1 | 600 |
| J7M7J1 | Uncharacterized protein | Streptococcus pyogenes M1 476 | 601 |
| M2LXP5 | Uncharacterized protein | Streptococcus mutans U2B | 602 |
| M2IJW5 | Uncharacterized protein | Streptococcus mutans M2A | 603 |
| M2KKV5 | Uncharacterized protein | Streptococcus mutans 66-2A | 604 |
| M2IIP5 | Uncharacterized protein | Streptococcus mutans NLML9 | 605 |
| M2DYK8 | Uncharacterized protein | Streptococcus mutans 4VF1 | 606 |
| M2HBR4 | Uncharacterized protein | Streptococcus mutans N66 | 607 |
| G5KAN2 | CRISPR-associated protein Cas9/Csn1, | Streptococcus pseudoporcinus LQ 940- | 608 |
| | subtype II/NMEMI | 04 | |
| M2F746 | Uncharacterized protein | Streptococcus mutans 11VS1 | 609 |
| M2KCP8 | Uncharacterized protein | Streptococcus mutans SA38 | 610 |
| K4N5K1 | CRISPR-associated protein, Csn1 | Streptococcus pyogenes A20 | 611 |
| | family | | |
| M2G9R5 | Uncharacterized protein | Streptococcus mutans A9 | 612 |
| M2KJE3 | Uncharacterized protein | Streptococcus mutans SM4 | 613 |
| M7CZ76 | Uncharacterized protein | Streptococcus mutans KK21 | 614 |
| M2FYT7 | Uncharacterized protein | Streptococcus mutans M21 | 615 |
| F5U4D7 | CRISPR-associated protein, Csn1 | Streptococcus dysgalactiae subsp. | 616 |
| | family (Fragment) | equisimilis SK1249 | |
| F5U5Q4 | Putative uncharacterized protein | Streptococcus dysgalactiae subsp. | 617 |
| | (Fragment) | equisimilis SK1249 | |
| M2H646 | Uncharacterized protein | Streptococcus mutans U138 | 618 |
| M2KHB4 | Uncharacterized protein | Streptococcus mutans SM1 | 619 |
| M2J4V9 | Uncharacterized protein | Streptococcus mutans ST6 | 620 |
| M2F2U6 | Uncharacterized protein | Streptococcus mutans 11SSST2 | 621 |
| G7SP82 | CRISPR-system-like protein | Streptococcus suis ST1 | 622 |
| M2FXA5 | Uncharacterized protein | Streptococcus mutans G123 | 623 |
| M2IJB5 | Uncharacterized protein | Streptococcus mutans NV1996 | 624 |
| M7E6C3 | Uncharacterized protein | Streptococcus mutans AC4446 | 625 |
| K1LK43 | Csn1 family CRISPR-associated protein | Streptococcus iniae 9117 | 626 |
| I0SF74 | CRISPR-associated protein Cas9/Csn1, | Streptococcus constellatus subsp. | 627 |
| | subtype II/NMEMI | constellatus SK53 | |
| M1YIE1 | Uncharacterized protein | Streptococcus agalactiae CF01173 | 628 |
| M2J1X3 | Uncharacterized protein | Streptococcus mutans W6 | 629 |
| I6SW88 | CRISPR-associated protein csn1 | Streptococcus mutans GS-5 | 630 |
| I6Q294 | Csn1 | Streptococcus thermophilus MN-ZLW- | 631 |
| | | 002 | |
| F0FD37 | Csn1 family CRISPR-associated protein | Streptococcus sanguinis SK353 | 632 |
| F9NIK9 | CRISPR-associated protein Cas9/Csn1, | Streptococcus dysgalactiae subsp. | 633 |
| | subtype II/NMEMI | equisimilis SK1250 | |
| F9NIK8 | Putative uncharacterized protein | Streptococcus dysgalactiae subsp. | 634 |
| | | equisimilis SK1250 | |
| M2JCP4 | Uncharacterized protein | Streptococcus mutans B | 635 |
| K4PPI8 | CRISPR-associated protein | Streptococcus agalactiae SA20-06 | 636 |
| E1LI65 | HNH endonuclease family protein | Streptococcus mitis SK321 | 637 |
| E9FJ16 | CRISPR-associated protein, Csn1 | Streptococcus sp. C300 | 638 |
| | family | | |
| M2KGB0 | Uncharacterized protein | Streptococcus mutans 14D | 639 |
| M7DIF2 | CRISPR-associated protein csn1 | Streptococcus mutans 5DC8 | 640 |
| M2INU6 | Uncharacterized protein | Streptococcus mutans SF1 | 641 |
| M2LHR5 | Uncharacterized protein | Streptococcus mutans 24 | 642 |
| J4TM44 | CRISPR-associated protein Cas9/Csn1, | Streptococcus anginosus SK1138 | 643 |
| | subtype II/NMEMI | | |
| M2JLG8 | Uncharacterized protein | Streptococcus mutans SM6 | 644 |
| I7QXF2 | Putative cytoplasmic protein | Streptococcus canis FSL Z3-227 | 645 |
| I3I1V4 | Putative cytoplasmic protein | Streptococcus pyogenes HKU | 646 |
| | | QMH11M0907901 | |
| J8T4Q2 | Uncharacterized protein | Streptococcus agalactiae GB00112 | 647 |
| E7S4M3 | Csn1 family CRISPR-associated protein | Streptococcus agalactiae ATCC 13813 | 648 |
| M2HZK2 | Uncharacterized protein | Streptococcus mutans NLML4 | 649 |
| M2DAT4 | Uncharacterized protein | Streptococcus mutans 1SM1 | 650 |
| M2GPV5 | CRISPR-associated protein | Streptococcus mutans NMT4863 | 651 |
| M5PJI2 | CRISPR-associated protein | Streptococcus parauberis KRS-02109 | 652 |
| F8Y040 | Putative uncharacterized protein | Streptococcus agalactiae FSL S3-026 | 653 |
| M2FXC0 | Uncharacterized protein | Streptococcus mutans 5SM3 | 654 |
| M2ENP9 | Uncharacterized protein | Streptococcus mutans NFSM2 | 655 |
| M1XWD6 | Uncharacterized protein | Streptococcus agalactiae SS1014 | 656 |
| K0U976 | Uncharacterized protein | Streptococcus agalactiae STIR-CD-17 | 657 |
| E0PEL3 | Csn1 family CRISPR-associated protein | Streptococcus bovis ATCC 700338 | 658 |
| M2EUD0 | Uncharacterized protein | Streptococcus mutans 3SN1 | 659 |
| E4L3R1 | CRISPR-associated protein, Csn1 | Streptococcus pseudoporcinus SPIN | 660 |
| | family | 20026 | |
| M2LYU7 | Uncharacterized protein | Streptococcus mutans R221 | 661 |
| M2IAS5 | Uncharacterized protein | Streptococcus mutans N3209 | 662 |
| M2KAP8 | Uncharacterized protein | Streptococcus mutans NLML1 | 663 |
| M2F4E1 | Uncharacterized protein | Streptococcus mutans N29 | 664 |
| E8JP81 | Csn1 family CRISPR-associated protein | Streptococcus equinus ATCC 9812 | 665 |
| M2G1L7 | Uncharacterized protein | Streptococcus mutans NVAB | 666 |
| J4K985 | CRISPR-associated protein Cas9/Csn1, | Streptococcus oralis SK304 | 667 |
| | subtype II/NMEMI | | |
| M2E7C1 | CRISPR-associated protein | Streptococcus mutans 15VF2 | 668 |
| Q3DQT5 | CRISPR-associated protein, SAG0894 | Streptococcus agalactiae 18RS21 | 669 |
| | family (Fragment) | | |
| M2IP01 | Uncharacterized protein | Streptococcus mutans SF14 | 670 |
| E6J3R0 | CRISPR-associated protein, Csn1 | Streptococcus anginosus F0211 | 671 |
| | family | | |
| G5JVJ9 | CRISPR-associated protein Cas9/Csn1, | Streptococcus macacae NCTC 11558 | 672 |
| | subtype II/NMEMI | | |
| K8MQ90 | CRISPR-associated protein cas9/csn1, | Streptococcus sp. F0441 | 673 |
| | subtype II/nmemi | | |
| M2KYT3 | Uncharacterized protein | Streptococcus mutans M230 | 674 |
| H8HAK7 | CRISPR-associated protein Csn1 | Streptococcus pyogenes MGAS15252 | 675 |
| M2HZJ5 | Uncharacterized protein | Streptococcus mutans NFSM1 | 676 |
| E4SQY2 | CRISPR-associated endonuclease, Csn1 | Streptococcus thermophilus (strain | 677 |
| | family | ND03) | |
| Q1JC13 | Hypothetical cytosolic protein | Streptococcus pyogenes serotype M12 | 678 |
| | | (strain MGAS2096) | |
| C6SPS8 | Uncharacterized protein | Streptococcus mutans serotype c (strain | 679 |
| | | NN2025) | |
| C5WH61 | CRISPR-associated protein Csn1 | Streptococcus dysgalactiae subsp. | 680 |
| | | equisimilis (strain GGS_124) | |
| Q8E042 | Putative uncharacterized protein | Streptococcus agalactiae serotype V | 681 |
| | | (strain ATCC BAA-611/2603 V/R) | |
| F5WVJ4 | CRISPR-associated protein | Streptococcus gallolyticus (strain ATCC | 682 |
| | | 43143/F-1867) | |
| D3HEH4 | CRISPR-associated protein | Streptococcus gallolyticus (strain | 683 |
| | | UCN34) | |
| J9YP56 | Uncharacterized protein | Streptococcus agalactiae serotype Ia | 684 |
| | | (strain GD201008-001) | |
| Q8E5R9 | Putative uncharacterized protein | Streptococcus agalactiae serotype III | 685 |
| | gbs0911 | (strain NEM316) | |
| F7IUC8 | Putative uncharacterized protein | Streptococcus pyogenes serotype M3 | 686 |
| | SPs1176 | (strain SSI-1) | |
| Q8DTE3 | Putative uncharacterized protein | Streptococcus mutans serotype c (strain | 687 |
| | | ATCC 700610/UA159) | |
| F0VS85 | CRISPR-associated protein | Streptococcus gallolyticus (strain ATCC | 688 |
| | | BAA-2069) | |
| B5XLC1 | Putative uncharacterized protein | Streptococcus pyogenes serotype M49 | 689 |
| | | (strain NZ131) | |
| Q3K1G4 | CRISPR-associated protein, SAG0894 | Streptococcus agalactiae serotype Ia | 690 |
| | family | (strain ATCC 27591/A909/CDC | |
| | | SS700) | |
| E8QAX4 | Hypothetical cytosolic protein | Streptococcus dysgalactiae subsp. | 691 |
| | | equisimilis (strain ATCC 12394/ | |
| | | D166B) | |
| H6PBR9 | CRISPR-associated protein, SAG0894 | Streptococcus infantarius (strain CJ18) | 692 |
| | family | | |
| Q48Z31 | Hypothetical cytosolic protein | Streptococcus pyogenes serotype M1 | 693 |
| Q1J6W2 | Hypothetical cytosolic protein | Streptococcus pyogenes serotype M4 | 694 |
| | | (strain MGAS10750) | |
| Q8K7R2 | Putative uncharacterized protein | Streptococcus pyogenes serotype M3 | 695 |
| | | (strain ATCC BAA-595/MGAS315) | |
| Q1JLZ6 | Hypothetical cytosolic protein | Streptococcus pyogenes serotype M12 | 696 |
| | | (strain MGAS9429) | |
| Q48TU5 | Hypothetical cytosolic protein | Streptococcus pyogenes serotype M28 | 697 |
| | | (strain MGAS6180) | |
| Q1JH43 | Hypothetical cytosolic protein | Streptococcus pyogenes serotype M2 | 698 |
| | | (strain MGAS10270) | |

[0359] Chylinski et al. (RNA Biology, 2013, 10:5, 726-737, the contents of which are herein incorporated by reference in their entirety including supplemental materials), has identified several Cas9 orthologs from Type II CRISPR-Cas loci. Any of these may be used as the CRISPR regulatable element.

[0360] According to the present invention, these Cas9 enzymes may also serve as genome editing enzymes, e.g., CRISPR regulatable elements, of the invention and are given in Table 5. Given in the table are the gi accession numbers from NCBI and the name of the bacterial strain. It will be understood that such enzymes, when expressed in any organism other than the wild type strain may be codon optimized for that organism at the nucleic acid level.

TABLE 5
Cas9 Orthologs

| | | SEQ ID |
|---|---|---|
| gi Number | Strain | NO |
| 491523080 | Veillonella atypica ACS-134-V-Col7a | 699 |
| 492568239 | Fusobacterium nucleatum subsp. vincentii | 700 |
| | ATCC 49256 | |
| 291166249 | Filifactor alocis ATCC 35896 | 701 |
| 320130861 | Solobacterium moorei F0204 | 702 |
| 291520705 | Coprococcus catus GD-7 | 703 |
| 42525843 | Treponema denticola ATCC 35405 | 704 |
| 496176552 | Peptoniphilus duerdenii ATCC BAA-1640 | 705 |
| 493553119 | Catenibacterium mitsuokai DSM 15897 | 706 |
| 24379809 | Streptococcus mutans UA159 | 707 |
| 15675041 | Streptococcus pyogenes SF370 | 708 |
| 499300419 | Listeria innocua Clip11262 | 709 |
| 500000752 | Streptococcus thermophilus LMD-9 | 710 |
| 323463801 | Staphylococcus pseudintermedius | 711 |
| 352684361 | Acidaminococcus intestini RyC-MR95 | 712 |
| 503017123 | Olsenella uli DSM 7084 | 713 |
| 366983953 | Oenococcus kitaharae DSM 17330 | 714 |
| 503128334 | Bifidobacterium bifidum S17 | 715 |
| 504382875 | Lactobacillus rhamnosus GG | 716 |
| 489744644 | Lactobacillus gasseri JV-V03 | 717 |
| 501247123 | Finegoldia magna ATCC 29328 | 718 |
| 47458196 | Mycoplasma mobile 163K | 719 |
| 284931710 | Mycoplasma gallisepticum str. F | 720 |
| 498006766 | Mycoplasma ovipneumoniae SC01 | 721 |
| 384393286 | Mycoplasma canis PG 14 | 722 |
| 144575181 | Mycoplasma synoviae 53 | 723 |
| 238875750 | Eubacterium rectale ATCC 33656 | 724 |
| 500000239 | Streptococcus thermophilus LMD-9 | 725 |
| 315149830 | Enterococcus faecalis TX0012 | 726 |
| 488391463 | Staphylococcus lugdunensis M23590 | 727 |
| 158432258 | Eubacterium dolichum DSM 3991 | 728 |
| 497700222 | Lactobacillus coryniformis subsp. torquens | 729 |
| | KCTC 3535 | |
| 503154365 | Ilyobacter polytropus DSM 2926 | 730 |
| 488935851 | Ruminococcus albus 8 | 731 |
| 187426541 | Akkermansia muciniphila ATCC BAA-835 | 732 |
| 117649621 | Acidothermus cellulolyticus 11B | 733 |
| 189429199 | Bifidobacterium longum DJO10A | 734 |
| 502666262 | Bifidobacterium dentium Bd1 | 735 |
| 499236428 | Corynebacterium diphtheriae NCTC 13129 | 736 |
| 501382854 | Elusimicrobium minutum Pei191 | 737 |
| 319419610 | Nitratifractor salsuginis DSM 16511 | 738 |
| 324027241 | Sphaerochaeta globus str. Buddy | 739 |
| 502574305 | Fibrobacter succinogenes subsp. succinogenes | 740 |
| | S85 | |
| 496648031 | Bacteroides fragilis NCTC 9343 | 741 |
| 506262077 | Capnocytophaga ochracea DSM 7271 | 742 |
| 499794158 | Rhodopseudomonas palustris BisB18 | 743 |
| 494010777 | Prevotella micans F0438 | 744 |
| 294472455 | Prevotella ruminicola 23 | 745 |
| 503930464 | Flavobacterium columnare ATCC 49512 | 746 |
| 310782306 | Aminomonas paucivoransDSM 12260 | 747 |
| 83591793 | Rhodospirillum rubrum ATCC 11170 | 748 |
| 502812437 | Candidatus Puniceispirillum marinum | 749 |
| | IMCC1322 | |
| 500133006 | Verminephrobacter eiseniae EF01-2 | 750 |
| 344171927 | Ralstonia syzygii R24 | 751 |
| 159042956 | Dinoroseobacter shibae DFL 12 | 752 |
| 288910049 | Azospirillum sp-B510 | 753 |
| 91802344 | Nitrobacter hamburgensis X14 | 754 |
| 146407516 | Bradyrhizobium sp-BTAi1 | 755 |
| 499451825 | Wolinella succinogenes DSM 1740 | 756 |
| 218563121 | Campylobacter jejuni subsp. jejuni NCTC 11168 | 757 |
| 502787413 | Helicobacter mustelae 12198 | 758 |
| 447027826 | Bacillus cereus Rock1-15 | 759 |
| 501844634 | Acidovorax ebreus TPSY | 760 |
| 189485225 | uncultured Termite group 1 bacterium phylotype | 761 |
| | RsD17 | |
| 489569047 | Clostridium perfringens D str. JGS1721 | 762 |
| 506406750 | Clostridium cellulolyticum H10 | 763 |
| 154154505 | Parvibaculum lavamentivorans DS-1 | 764 |
| 493910016 | Roseburia intestinalis L1-82 | 765 |
| 488163954 | Neisseria meningitidis Z2491 | 766 |
| 499209493 | Pasteurella multocida subsp. multocida str. Pm70 | 767 |
| 491573077 | Sutterella wadsworthensis 3 1 45B | 768 |
| 495559660 | gamma proteobacterium HTCC5015 | 769 |
| 499526152 | Legionella pneumophila str. Paris | 770 |
| 496140336 | Parasutterella excrementihominis YIT 11859 | 771 |
| 499451967 | Wolinella succinogenes DSM 1740 | 772 |
| 489129153 | Francisella novicida U112 | 773 |

[0361] Any of the enzymes or proteins of Tables 4 or 5 may be a CRISPR regulatable element. Several protospacer adjacent motifs (PAMs) have been identified in the art (Westra et al., Annu Rev. Genet. 2012, 46: 311-39; the contents of which are incorporated herein by reference in their entirety). Such PAMs may be used to inform the selection of and/or design of the nucleic acid compositions, e.g., CRISPR-AAV particles, of the present invention. It is also contemplated that utilization of certain Type III enzymes such as those from Staphylococcus epidermidis, Pyrococcus furiosus or S. solfatarcicus will not require the presence of a PAM sequence. PAMs useful in the present invention are given in Table 6. In the table the PAM either follows or precedes the protospacer (that region of the DNA found immediately upstream or downstream of the PAM and on the opposite DNA strand that hybridizes with the sgRNA).

TABLE 6
PAM sequences

| PAM | SEQ ID NO |
|---|---|
| Protospacer-NGG | 774-777 |
| Protospacer-GAA | 778-779 |
| Protospacer-CTT | 780-781 |
| Protospacer-CAT | 782 |
| Protospacer-CCT | 783 |
| Protospacer-CTC | 784 |
| Protospacer-GG | 785-786 |
| WTTCTNN-Protospacer | 787 |
| TTTYRNNN-Protospacer | 788 |
| CNCCN-Protospacer | 789 |
| CCN-Protospacer | 790-791 |

[0362] Recently several improvements have been made to the CRISPR system, which address the more limited AAV packaging size. Recent work with minimal promoter and polyadenylation sequences has produced functional SpCas9 constructs that can be effectively packaged in AAVs, as described in Swiech et al., (In vivo interrogation of gene function in the mammalian brain using CRISPR-Cas9; Nat Biotechnol. 2015 January; 33(1):102-6) and Senis et al. (CRISPR/Cas9-mediated genome engineering: an adeno-associated viral (AAV) vector toolbox; Biotechnol J. 2014 November; 9(11):1402-12), the contents of each of which is herein incorporated by reference in its entirety. In addition, Ran et al., characterized six smaller Cas9 orthologues, including Cas9 from Staphylococcus aureus, which they packed with a guide RNA into a single AAV vector to target PCSK9 in the liver, as described in Ran et al., In vivo genome editing using Staphylococcus aureus Cas9, Nature. 2015 Apr. 9; 520(7546):186-91, the contents of which is herein incorporated by reference in its entirety. Other smaller Cas enzymes have also been described by Cong L et al. (Multiplex genome engineering using CRISPR/Cas systems; Science 339, 819-823, 2013) and Nishimasu et al. (Crystal structure of Cas9 in complex with guide RNA and target DNA; Cell 156, 935-949, 2014), the contents of each of which is herein incorporated by reference in its entirety.

[0363] Fine et al., describe a split-intein Cas9, which can be separated into two AAV cassettes, each less than 4 kb, providing room for regulatory sequences and additional gRNAs in each cassette (Sci Rep. 2015; 5: 10777; Trans-spliced Cas9 allows cleavage of HBB and CCRS genes in human cells using compact expression cassettes), the contents of which is herein incorporated by reference in its entirety. Fusion of effector domains which can be added to the cassette without space constraints include dCas9, FokI, VP64, and KRAB.

[0364] In one embodiment, the regulatable-AAV particle of the present invention may be an AAV-split-Cas9 system as described in Chew et al (A multifunctional AAV—CRISPR-Cas9 and its host response; Nature Methods; published online Sep. 5, 2016), the contents of which are herein incorporated by reference in their entirety. In this split-Cas9 system, SpCas9 is split at its disordered linker (V713-D718), which allows reconstitution of full length Cas9 in vivo by split intein protein trans-splicing. The N-terminal lob of Cas9 is fused to the Rhodothermus marinus N-split intein, while the C-terminal lobe is fused with C-split intein, together shortening the coding sequences below those of other known Cas9 orthologs. In some embodiments the split-Cas9 system may incorporate transcription-activator fusion domains, allowing for targeted upregulation of gene expression. Further, nuclease-active Cas9 combined with truncated gRNAs can bind genomic loci and generate gene activation rather than DNA breaks, thereby allowing a single Cas-9 activator fusion protein to function in gene editing or gene activation processes, depending on the gRNAs and spacer lengths.

[0365] Yang et al., describe administering two AAVs, one expressing Cas9 and the other one expressing a guide RNA and the donor DNA (Nature Biotechnology, 2016, A dual AAV system enables the Cas9-mediated correction of a metabolic liver disease in newborn mice; the contents of which are herein incorporated by reference in its entirety). The Cas9 may be a Cas9 enzyme from Staphylococcus aureus (SaCas9) and the AAV may comprise a TBG promoter. The second AAV may comprise a U6 promoter, a single guide RNA (sgRNA) sequence and a donor DNA.

[0366] Yin et al., describe combining lipid nanoparticle-mediated delivery of Cas9 mRNA with AAV encoding a sgRNA and a repair template to induce repair of a disease gene in animals (Nature Biotechnology, 2016, Therapeutic genome editing by combined viral and non-viral delivery of CRISPR system components in vivo; the contents of which are herein incorporated by reference in its entirety). Additionally the Cas9 may be the smaller form version of Cas9 (Staphylococcus aureus Cas9).

[0367] It is contemplated that of the constructs and enzymes described in Swiech et al, Senis et al., Ran et al., Cong et al., Nishimasu et al., or Fine et al. or any other CRISPR systems optimized for smaller packaging size, may be used as part of the instant invention as CRISPR regulatable elements and/or CRISPR-AAV particles.

[0368] In one embodiment, the expression of the payload may be regulated by a CRISPR Cas9 enzyme and a guide RNA that targets the enzyme to a site within the payload. In some embodiments, the regulatable element may comprise two or more guide RNAs. In some embodiments, the two or more guide RNAs may be specific for two or more different sequences within one or more viral genomes.

[0369] In one embodiment, the CRISPR regulatable element may be a “self-destructing message,” i.e. as Cas9 mRNA is transcribed and then translated, the protein Cas9 together with the sgRNA may bind and create a double strand break in the same delivery vehicle, effectively disrupting its function and destroying the delivery vehicle. An exemplary “self-destructing message is described in Moore et al., Nucl. Acids Res., 2014, the contents of which is herein incorporated in its entirety.

[0370] In one embodiment, the regulatable element of the present invention, when expressed, may be a CRISPR effector protein as described in United States Publication No. US 20160208243, the contents of which are herein incorporated by reference in their entirety. In one embodiment, the CRISPR effector protein is a Cpf1 effector protein, comprising a C-terminal RuvC domain, an N-terminal alpha-helical region and a mixed alpha and beta region located between the RuvC and alpha-helical domains. In these cases, the CRISPR arrays are processed into mature crRNAs without the need of a tracrRNA, wherein the crRNAs comprise a spacer sequence and a direct repeat sequence. A Cpf1p-crRNA complex is alone sufficient to cleave target DNA. In one embodiment, the CRISPR effector protein is a C2c1 loci effector protein. In some embodiments the CRISPR effector protein may have mutations or modifications therein. Further the Cpf1 CRISPR-Cas system may be a split-Cpf1, an inducible system, a self-inactivating system, or a multiplex-tandem targeting approach system. The Cpf1 CRISPR effector proteins described herein may be delivered to plants, animals, stem cells or the like and may be used to treat diseases or disorders.

[0371] In one embodiment, the payload expression may be regulated through the stability of the guide RNA. In one embodiment, the guide RNA may be stabilized through stabilizing elements known in the art. For example, extending the 5′ end of the gRNA may increase the half-life of the gRNA (Mali P, et al. CAS9 transcriptional activators for target specificity screening and paired nickases for cooperative genome engineering. Nat Biotechnol. 2013; 31:833-838). In another embodiment, the guide RNA may be destabilized through destabilizing sequences including those described herein.

[0372] In one embodiment, the expression of Cas9 and the guide RNA may be under control of one promoter. In another embodiment, the expression of Cas9 and the guide RNA may be under control of separate promoters. In one embodiment, Cas9 and the guide RNA expression may both be driven by the same or two different constitutive promoter(s). In one embodiment, the Cas9 and the guide RNA expression may both be driven by the same or two different inducible promoter(s). In another embodiment, the expression of one of the components may be driven by a constitutive promoter, and the other by an inducible promoter. In another embodiment, the viral genome comprises a promoter which can drive tissue specific expression, such that the CRISPR regulatable element is only expressed in certain tissues.

[0373] In one embodiment, the VP2 capsid may comprise a DNA binding domain for the cas9 promoter and/or a transactivating factor for cas9. The transactivating factor may be pre-engineered to induce cas9 expression.

[0374] In one embodiment, the expression of cas9 with a VP2 capsid comprising a DNA binding domain for the cas9 promoter and/or a transactivating factor for cas9 may be consistent over a period of time. The expression may be consistent for minutes (e.g., 1, 2, 3, 4, 5, 6, 7, 8, 9, 10, 15, 20, 25, 30, 35, 40, 45, 50, 55, or more than 55 minutes), hours (e.g., 1, 2, 3, 4, 5, 6, 7, 8, 9, 10, 11, 12, 13, 14, 15, 16, 17, 18, 19, 20, 21, 22, 23 or more than 24 hours), days (e.g., 1, 2, 3, 4, 5, 6, 7, 8, 9, 10, 11, 12, 13, 14, 15, 16, 17, 18, 19, 20 or more than 20 days), weeks (e.g., 1, 2, 3, 4, 5, 6, 7, 8, 9, 10 or more than 10 weeks), or months (e.g., 1, 2, 3, 4, 5, 6, 7, 8, 9, 10, 11, or more than 11 months). As another non-limiting example, expression of cas9 may be a burst of expression for a predetermined period of time (e.g., burst of expression for one hours, two hours, three hours, four hours, five hours, six hours or greater than six hours after administration).

[0375] In one embodiment, the promoter and/or transactivating domain for cas9 may be located within the first 1%, 2%, 3%, 4%, 5%, 6%, 7%, 8%, 9%, 10%, 15%, 20%, 25%, 30%, 35%, 40%, 45%, 46%, 47%, 48,% or 49% of the VP2 capsid. In another embodiment, the promoter and/or transactivating domain for cas9 may be located within the last 1%, 2%, 3%, 4%, 5%, 6%, 7%, 8%, 9%, 10%, 15%, 20%, 25%, 30%, 35%, 40%, 45%, 46%, 47%, 48,% or 49% of the VP2 capsid. In another embodiment, the promoter and/or transactivating factor for cas9 may be located in the middle of the VP2 capsid. In another embodiment, the promoter and/or transactivating domain for cas9 may be located near the beginning of the VP2 capsid. In another embodiment, the promoter and/or transactivating domain for cas9 may be located near the end of the VP2 capsid.

[0376] In some embodiments, the CRISPR regulatable element may encode Cpf1. Cpf1, a class II CRISPR endonuclease, is a single RNA-guided endonuclease lacking tracrRNA, which utilizes a T-rich protospacer-adjacent motif. Cpf1 cleaves DNA via a staggered DNA double-stranded break. Cpf1 is smaller than the standard Cas9, facilitating delivery to desired tissues, as described in Zetsche et al. (Cpf1 Is a Single RNA-Guided Endonuclease of a Class 2 CRISPR-Cas System, Cell, published online Sep. 25, 2015), the contents of which is herein incorporated by reference in its entirety.

[0377] In one embodiment, the expression of Cpf1 and the guide RNA may be under control of one promoter. In another embodiment, the expression of Cpf1 and the guide RNA may be under control of separate promoters. In one embodiment, Cpf1 and the guide RNA expression may both be driven by the same or two different constitutive promoter(s). In one embodiment, the Cpf1 and the guide RNA expression may both be driven by the same or two different inducible promoter(s). In another embodiment, the expression of one of the components may be driven by a constitutive promoter, and the other by an inducible promoter. In another embodiment, the viral genome comprises a promoter which can drive tissue specific expression, such that the CRISPR regulatable element is only expressed in certain tissues.

[0378] In one embodiment, the VP2 capsid may comprise a DNA binding domain for the Cpf1 promoter and/or a transactivating factor for Cpf1. The transactivating factor may be pre-engineered to induce Cpf1 expression.

[0379] In one embodiment, the expression of Cpf1 with a VP2 capsid comprising a DNA binding domain for the Cpf1 promoter and/or a transactivating factor for Cpf1 may be consistent over a period of time. The expression may be consistent for minutes (e.g., 1, 2, 3, 4, 5, 6, 7, 8, 9, 10, 15, 20, 25, 30, 35, 40, 45, 50, 55, or more than 55 minutes), hours (e.g., 1, 2, 3, 4, 5, 6, 7, 8, 9, 10, 11, 12, 13, 14, 15, 16, 17, 18, 19, 20, 21, 22, 23 or more than 24 hours), days (e.g., 1, 2, 3, 4, 5, 6, 7, 8, 9, 10, 11, 12, 13, 14, 15, 16, 17, 18, 19, 20 or more than 20 days), weeks (e.g., 1, 2, 3, 4, 5, 6, 7, 8, 9, 10 or more than 10 weeks), or months (e.g., 1, 2, 3, 4, 5, 6, 7, 8, 9, 10, 11, or more than 11 months). As another non-limiting example, expression of Cpf1 may be a burst of expression for a predetermined period of time (e.g., burst of expression for one hours, two hours, three hours, four hours, five hours, six hours or greater than six hours after administration).

[0380] In one embodiment, the promoter and/or transactivating domain for Cpf1 may be located within the first 1%, 2%, 3%, 4%, 5%, 6%, 7%, 8%, 9%, 10%, 15%, 20%, 25%, 30%, 35%, 40%, 45%, 46%, 47%, 48,% or 49% of the VP2 capsid. In another embodiment, the promoter and/or transactivating domain for Cpf1 may be located within the last 1%, 2%, 3%, 4%, 5%, 6%, 7%, 8%, 9%, 10%, 15%, 20%, 25%, 30%, 35%, 40%, 45%, 46%, 47%, 48,% or 49% of the VP2 capsid. In another embodiment, the promoter and/or transactivating factor for Cpf1 may be located in the middle of the VP2 capsid. In another embodiment, the promoter and/or transactivating domain for Cpf1 may be located near the beginning of the VP2 capsid. In another embodiment, the promoter and/or transactivating domain for Cpf1 may be located near the end of the VP2 capsid.

[0381] In one embodiment, the payload comprises one or more CRISPR recognition sequences. As used herein, the term “CRISPR recognition sequence” refers to a sequence in a construct that the CRISPR system can recognize and can target for regulation of that construct. In one embodiment, the one or more CRISPR recognition sequence is within the coding region. In one embodiment, the CRISPR recognition sequence is outside of the coding region. These regions in which the CRISPR recognition sequence may be located include, but are not limited to, the 5′ITR region, the region downstream of the 5′ITR and upstream of the promoter, the promoter region, the 5′UTR region, the coding region, the 3′UTR region, the region downstream of the 3′UTR and upstream of the 3′ITR, and the 3′ITR region.

[0382] In one embodiment, the guide RNAs, which may be encoded within or used in combination with the regulatable-AAV particles of the present invention, target specific nucleotide sequences of the DMD gene, and can be used for the treatment of Duchenne muscular dystrophy or Becker muscular dystrophy as described in International Publication No. WO2016161380, the contents of which are herein incorporated by reference in their entirety. This genome editing system comprises a first and second gRNA each targeting a domain of 19-24 nucleotides in length of the DMD gene, and at least one Cas9 molecule that recognizes a PAM of either NNGRRT or NNGRRV. This genome editing system results in a first and second double strand break in the first and second intron flanking exon 51 of the DMD gene, thereby causing its deletion. In one embodiment, the gRNA may have a targeting domain that comprises a nucleotide sequence as set forth by any of SEQ ID NOs: 206-826366 as described in WO2016161380.

[0383] In one embodiment, the CRISPR regulatable elements may be located on the same viral genome as the payload. In another embodiment, the CRISPR regulatable elements and payload are on a separate viral genomes and packaged in separate AAV particles.

### Other Cas9 Fusion Proteins

[0384] In one embodiment, the CRISPR/Cas9 system can be reengineered for transcriptional regulation and used with or encapsulated by the viral particles described herein (e.g., AAV particles or CRISPR-AAV particles). Cas9 catalyzes DNA double-stranded breaks via RuvC and HNH endonuclease domains, each of which cleaves one strand of the target DNA. Both of these enzymatic domains can be inactivated by a single amino acid substitution (D10A and H840A), generating a Cas9 protein that has no endonuclease activity but maintains its RNA-guided DNA-binding capacity, as described in Kabadi and Gersbach, Engineering Synthetic TALE and CRISPR/Cas9 Transcription Factors for Regulating Gene Expression, Methods. 2014 September; 69(2): 188-197 and references therein, the contents of which is herein incorporated by reference in its entirety. This deactivated Cas9 (dCas9), in conjunction with the gRNA, can function as a modular DNA-binding scaffold. Both activators and repressors have been generated using dCas9, in which the dCas9 is fused to transactivation domains or repressor domains known in the art. Non-limiting examples of these activators and repressors are described in WIPO Patent Publication No. WO2014197748, the contents of which is herein incorporated by reference in its entirety.

[0385] In one embodiment, the CRISPR regulatable element may comprise dCas9 fusion protein further comprising a transactivation or repression domain. In one embodiment, the CRISPR regulatable element may further comprise a guide RNA. In one embodiment, the regulatable element may comprise a dCas9 fusion protein as described in International Publication No. WO2014197748, the contents of which is herein incorporated by reference in its entirety. In some embodiments, the CRISPR regulatable element may comprise a dCas9 fusion protein which is fused to the Krüppel-associated box (KRAB) repressor. In some embodiments, the CRISPR regulatable element may comprise a dCas9 fusion protein which is fused to a transactivation domain selected from VP16, VP64, and NFkappaB p65 transactivation domains or the omega subunit of RNA polymerase.

[0386] In one embodiment, the CRISPR regulatable element may comprise a Cas9 fusion protein described in WIPO Patent Publication WO2014089290, the contents of which is herein incorporated by reference in its entirety. In one embodiment, the CRISPR regulatable element may comprise a Cas9 fusion protein described in International Publication No. WO2015070083, the contents of which is herein incorporated in its entirety. In one embodiment, the Cas9 protein may be enzymatically active, or enzymatically inactive, and is operably linked or fused to the payload, as described in WIPO Patent Publication WO2015070083.

[0387] In one embodiment, the regulatable-AAV particles of the present invention comprise a system of a Cas9 heterodimer, and a Cas9 guide RNA and/or a dimerizing agent, as described in International Publication WO2016114972, the contents of which are herein incorporated by reference in their entirety. In one embodiment, the Cas9 heterodimer comprises a first and a second fusion polypeptide. The first polypeptide comprises a RuvCI polypeptide, a RuvCII polypeptide, an HNH polypeptide, a RuvCIII polypeptide, a PAM-interacting polypeptide and a first fusion partner that is the first member of a dimerization pair. The second polypeptide of the Cas9 heterodimer comprises an alpha-helical recognition region and a second fusion partner that is the second member of the dimerization pair. In some embodiments, the first or second fusion protein may also comprise a nuclear localization signal (NLS). The Cas9 heterodimer may have a sequence having at least 75% sequence identity to SEQ ID NOs: 1-259; 795-1346; or 1545 of International Publication WO2016114972, the contents of which are herein incorporated by reference in their entirety. In some embodiments, the Cas9 heterodimer is used with a guide RNA that comprises stem loop 1, but does not include stem loop 2 and/or stem loop 3.

[0388] In one embodiment, the CRISPR/Cas9 system used with or encapsulated by the viral particles described herein (e.g., AAV particles or CRISPR-AAV particles) is a light inducible CRISPR system. Light inducible CRISPR systems have also been engineered, by fusing the light-inducible heterodimerizing proteins CRY2 and CIB1 from Arabidopsis thaliana to the VP64 transactivation domain at either the N- or C-terminus of dCas9, respectively, as described in Polstein and Gersbach, A light-inducible CRISPR/Cas9 system for control of endogenous gene activation, the contents of which is herein incorporated by reference in its entirety. In one embodiment, the regulatable element of the current invention comprises a dCas9 fusion protein and a transactivating fusion protein, both comprising a light inducible dimerization domain. Any of the light inducible domains described in Jinek et al., A programmable dual-RNA-guided DNA endonuclease in adaptive bacterial immunity, 2012 Aug. 17; 337(6096):816-21, or supra herein, may be used.

[0389] In one embodiment, any Cas9 or Cas9 orthologs may be fused to a destabilizing domain and used with or encapsulated by the viral particles described herein (e.g., AAV particles or CRISPR-AAV particles). Non-limiting examples of destabilizing domains include FK506 Binding Protein (FKBP), E. coli dihydrofolate reductase (DHFR), mouse ornithine decarboxylase (MODC), and estrogen receptors (ER).

[0390] In one embodiment, the regulatable-AAV particle of the present invention may comprise a CRISPR/Cas9 system that is inducible with doxycycline, as described by de Solis et al (The development of a viral mediated CRISPR/Cas9 system with doxycycline dependent gRNA expression for inducible in vitro and in vivo genome editing; Frontiers Molecular Neuroscience; August 2016; 9:70), the contents of which are herein incorporated by reference in their entirety. In this two-vector system, the viral genome of the first AAV particle comprises an H1/TO or U6/TO promoter for expression of the gRNA as well as a Tet repressor element to regulate the expression of the gRNA in a doxycycline dependent manner and the second AAV particle delivers the Cas9. In another embodiment, it is the Cas9 expression that is regulatable by doxycycline, through the use of a truncated second generation tetracycline response element promoter. In the presence of doxycycline, either the gRNAs or the Cas9 are expressed and gene editing or regulatable expression may occur.

### Suicide Regulatable Elements

[0391] In one embodiment, the regulatable element comprises a suicide mechanism.

[0392] Several inducible suicide mechanisms are known in the art. One of the best characterized suicide systems is the herpes virus thymidine kinase/ganciclovir system. HSV/Tk phosphorylates the prodrug ganciclovir, which is then further converted by endogenous kinases into its triphosphate form. During replication, DNA polymerases then incorporate ganciclovir-triphosphate into DNA, causing polymerase inhibition and induction of apoptosis, and cell death.

[0393] Other inducible suicide systems involve inducible Caspase 9, and enzyme which functions as an executioner in the apoptotic pathway. For example, an inducible Caspase 9 system, iCasp9, was described by Di Stasi, et al. (2011)—Inducible apoptosis as a safety switch for adoptive cell therapy. N Engl J Med 365: 1673-1683. iCasp9 is composed of two inactive parts, fused to the FK506-binding protein FKBP12. Dimerization of the parts is induced by addition of the dimerizing ligand AP1903. Other examples of suicide genes include caspase-8 or cytosine deaminase.

[0394] In one embodiment, payload expression is turned off through a suicide mechanism. In one embodiment, the suicide mechanism comprises a regulatable element comprising herpes virus thymidine kinase. In one embodiment, the regulatable element when expressed comprises iCasp9.

[0395] In some embodiments, Caspase-9 may be activated using a specific chemical inducer of dimerization (CID) AP20187. In some embodiments, the regulatable element comprises the inducible Caspase-9 described in US Publication No. US20130071414, the contents of which is herein incorporated by reference in its entirety.

### Regulatable Elements: Protein Stability

[0396] In some embodiments, the payload expression may be regulated by fusion of a stabilizing or a destabilizing domain. Stabilizing and destabilizing domains which can be used are well known in the art. Non-limiting examples of destabilizing domains include FK506 Binding Protein (FKBP), E. coli dihydrofolate reductase (DHFR), mouse ornithine decarboxylase (MODC), or estrogen receptors (ER). In one embodiment, the destabilizing domain may be from an estrogen receptor.

[0397] In some embodiments the destabilizing domain may be inducible. In some embodiments the destabilizing domain may be a “single ligand-single domain,” which allows control of protein stability through a small molecule ligand. In some embodiments the destabilizing domain may be FK506- and rapamycin-binding protein (FKBP12) destabilizing domain, which can be regulated by rapamycin and its analogs, and is unstable in the absence of its ligand. In one embodiment, a point mutant (L106P) of the 107-amino acid protein FKBP confers instability to fusion partners, and this instability is reversed by a synthetic ligand named Shield-1, as described in Banaszynski, L., Chen, L., Maynard-Smith, L. A., Ooi, G. L. and Wandless, T. J. A rapid, reversible, and tunable method to regulate protein function in living cells using synthetic small molecules. Cell 126, 995-1004 (2006), the contents of which is herein incorporated by reference in its entirety.

[0398] In another embodiment, the destabilizing domain may be derived from E. Coli dihydrofolate reductase. In some embodiments the small molecule trimethoprim (TMP) can bind to the domain and act as a stabilizer, for example, as described in Iwamoto et al. (Chem Biol. 2010 Sep. 24; 17(9):981-8. A general chemical method to regulate protein stability in the mammalian central nervous system) the contents of which is herein incorporated by reference in its entirety. This system has been shown to be applied to regulation of glia cell derived neurotrophic factor (GDNF), as described in Tai et al. (DOI: 10.1371/journal.pone.0046269, Destabilizing Domains Mediate Reversible Transgene Expression in the Brain), the contents of which is herein incorporated by reference in its entirety.

[0399] In another embodiment, the destabilizing domain may be a light sensitive degradation domain. In a non-limiting example, the light sensitive degradation domain may be one of the domains described in U.S. Pat. No. 9,115,184, the contents of which is herein incorporated by reference in its entirety. In one embodiment, the domain comprises LOV24.

[0400] It is contemplated as part of the invention that any of the destabilizing domains may be combined with any of the enzymes, proteins and fusion proteins described herein.

[0401] In one embodiment, a CRISPR/Cas9 or ortholog may be fused to a destabilizing domain. In one embodiment, a CRISPR/Cas9 or ortholog may be fused to a destabilizing domain which can be further regulated by a ligand.

[0402] In one embodiment, CRE recombinase may be fused to a destabilizing domain. In one embodiment, the CRE recombinase may be fused to a destabilizing domain which can be further regulated by a ligand.

[0403] In one embodiment, FLP recombinase may be fused to a destabilizing domain. In one embodiment, the FLP recombinase may be fused to a destabilizing domain which can be further regulated by a ligand.

[0404] In one embodiment, a meganuclease may be fused to a destabilizing domain. In one embodiment, the meganuclease may be fused to a destabilizing domain which can be further regulated by a ligand.

[0405] In one embodiment, a serine integrase may be fused to a destabilizing domain. In one embodiment, the serine integrase may fused to a destabilizing domain which can be further regulated by a ligand.

[0406] In one embodiment, a zinc finger nuclease may be fused to a destabilizing domain. In one embodiment, the zinc finger nuclease may be fused to a destabilizing domain which can be further regulated by a ligand.

[0407] In one embodiment a fusion protein comprising a TAL effector domain may be fused to a destabilizing domain. In one embodiment, the fusion protein comprising a TAL effector domain may be fused to a destabilizing domain which can be further regulated by a ligand.

[0408] In one embodiment, one or more fusion proteins described herein comprising DNA binding domains and/or transactivation domains may further comprise a destabilizing domain. In one embodiment, tetracycline transactivator protein may further comprise a destabilizing domain. In another embodiment, a hormone responsive protein or fusion protein may further comprise a destabilizing domain. In one embodiment, an ecdysone inducible fusion protein further comprises a destabilizing domain. In one embodiment, one or more fusion proteins within a rapamycin inducible system may further comprise a destabilizing domain.

### Regulatable Element: RNA Transcripts

[0409] Various polynucleotide based methods are also contemplated as useful for regulation of payload expression in certain aspects of the instant invention.

[0410] In one embodiment, the regulatable element comprises a polynucleotide which may bind to the transcript encoded by the payload construct.

[0411] In one embodiment, the regulatable element comprises one or more interfering RNA sequences. In one embodiment, the regulatable element comprising the one or more interfering RNA sequences functions to temporarily turn off or reduce expression of the payload. In one embodiment, the regulatable element comprising the one or more interfering RNA sequences functions to permanently reduce or turn off expression of the payload. In one embodiment, the regulatable element comprises one or more siRNA sequences. In one embodiment, the regulatable element comprises one or more shRNA sequences. In one embodiment, the regulatable element comprises one or more microRNA sequences. In one embodiment, the payload construct may comprise a microRNA binding site or an siRNA binding site. MicroRNA binding sites may be inserted in the 5′ UTR or the 3′UTR of the payload, or within the coding sequence of the payload. siRNA or shRNA binding sites may be inserted in the 5′UTR or the 3′UTR of the payload or within the payload coding sequence. The payload construct may comprise at least one or more binding sites for a miRNA, siRNA or shRNA. These one or more binding sites may be target sites for the same or for various different microRNAs, siRNAs or shRNAs.

[0412] In one embodiment, the payload expression may be regulated by an antisense oligonucleotide. In one embodiment, the regulatable element comprises an antisense oligonucleotide.

[0413] In one embodiment, the regulatable element may comprise a ribozyme. In one embodiment, the ribozyme may be a trans-acting hammerhead ribozyme. A ribozyme site may be inserted in the payload construct within the 5′UTR or the 3′UTR of the payload or within the coding sequence.

[0414] In one embodiment, the regulatable element may be a riboswitch. In a non-limiting example, the riboswitch may be the inducible guanine-responsive GuaM8HDV aptazyme, which attenuates transgene expression upon a single addition of guanine, as described in Strobel et al., “Riboswitch-mediated Attenuation of Transgene Cytotoxicity Increases Adeno-associated Virus Vector Yields in HEK-293 Cells.” Mol Ther. 2015 Jul. 3, the contents of which is herein incorporated by reference in its entirety.

[0415] In one embodiment, the regulatable element comprising at least one polynucleotide, e.g. the siRNA, miRNA, antisense polynucleotide, ribozyme or riboswitch, is driven by a constitutive promoter.

[0416] In one embodiment, the regulatable element comprising at least one polynucleotide, e.g. the siRNA, miRNA, antisense polynucleotide, ribozyme or riboswitch, is driven by an inducible promoter.

[0417] In one embodiment, the regulatable element comprising at least one polynucleotide, e.g. the siRNA, miRNA, antisense polynucleotide, ribozyme or riboswitch, is driven by a tissue specific promoter.

[0418] In one embodiment, the regulatable system may further include additional regulatable elements, which may comprise any of the fusion proteins, enzymes and/or chemical compounds described herein.

[0419] As mentioned herein, tissue specific regulation of payload expression may also be mediated through tissue specific microRNAs. In one embodiment, one or more microRNA binding sites may be included in the payload construct to reduce or eliminate payload expression in a particular tissue.

### Regulatable Element: Destabilizing RNA Sequences

[0420] Heterologous UTRs or regulatable elements from heterologous UTRs can be incorporated into the UTRs of the payload or the regulatable element. Regulatable elements or sequences within the 5′ and 3′ UTRs will contribute to stabilizing or destabilizing the payload or regulatable element mRNA. For example, the 5′UTRs and 3′UTRs may include translational enhancer elements, which are well known in the art.

[0421] In one embodiment, the payload transcript may comprise a destabilizing sequence such as, but not limited to, a 3′UTR with AU-rich elements or AUUUA motifs. Destabilizing sequences are well known in the art and can for example be chosen from those in cytokines, proto-oncogenes, interferon mRNAs or human estrogen receptor alpha.

[0422] In one embodiment, the regulatable element may comprise a RNA binding protein, which can stabilize or destabilize the payload transcript.

[0423] As another a non-limiting example, the mRNA sequence for any regulatable element, including the inducible fusion proteins, and nucleases, such as cas9 or cas9 orthologs may comprise a destabilizing sequence, such as, but not limited to, a 3′UTR with AU-rich elements or AUUUA motifs. In some embodiments the UTRs employed are heterologous relative to the payload.

### Production of Viral Particles

[0424] The present disclosure provides a method for the generation of viral particles, by viral genome replication in a viral replication cell comprising contacting the viral replication cell with a payload construct vector and a viral construct vector.

[0425] The present disclosure provides a method for producing a viral particle having enhanced (increased, improved) transduction efficiency comprising the steps of: 1) co-transfecting competent bacterial cells with a bacmid vector and either a viral construct vector and/or payload construct vector, 2) isolating the resultant viral construct vector and payload construct vector and separately transfecting viral replication cells, 3) isolating and purifying resultant payload and viral construct particles comprising viral construct vector or payload construct vector, 4) co-infecting a viral replication cell with both the payload construct vector and viral construct vector, 5) harvesting and purifying the viral particle comprising a parvoviral genome. Production methods are further disclosed in commonly owned and co-pending International Publication No. WO2015191508, the contents of which are herein incorporated by reference in their entirety.

[0426] Vectors used in the production of viral particles include those encoding the payload, e.g. payload construct vectors, and those encoding accessory proteins necessary for production, e.g. viral construct vectors.

### Cells

[0427] Viral production of the invention disclosed herein describes processes and methods for producing viral particles (e.g., AAV particles and regulatable-AAV particles) that contact a target cell to deliver a payload construct, e.g. a recombinant viral construct, which comprises a nucleotide encoding a payload molecule.

[0428] In one embodiment, the viral particles (e.g., AAV particles and regulatable-AAV particles) of the invention may be produced in a viral replication cell that comprises an insect cell.

[0429] Growing conditions for insect cells in culture, and production of heterologous products in insect cells in culture are well-known in the art, see U.S. Pat. No. 6,204,059, the contents of which are herein incorporated by reference in their entirety.

[0430] Any insect cell which allows for replication of parvovirus and which can be maintained in culture can be used in accordance with the present invention. Cell lines may be used from Spodoptera frugiperda, including, but not limited to the Sf9 or Sf21 cell lines, drosophila cell lines, or mosquito cell lines, such as Aedes albopictus derived cell lines. Use of insect cells for expression of heterologous proteins is well documented, as are methods of introducing nucleic acids, such as vectors, e.g., insect-cell compatible vectors, into such cells and methods of maintaining such cells in culture. See, for example, METHODS IN MOLECULAR BIOLOGY, ed. Richard, Humana Press, N J (1995); O'Reilly et al., BACULOVIRUS EXPRESSION VECTORS, A LABORATORY MANUAL, Oxford Univ. Press (1994); Samulski et al., J. Vir. 63:3822-8 (1989); Kajigaya et al., Proc. Nat'l. Acad. Sci. USA 88: 4646-50 (1991); Ruffing et al., J. Vir. 66:6922-30 (1992); Kimbauer et al., Vir. 219:37-44 (1996); Zhao et al., Vir. 272:382-93 (2000); and Samulski et al., U.S. Pat. No. 6,204,059, the contents of each of which are herein incorporated by reference in their entirety.

[0431] The viral replication cell may be selected from any biological organism, including prokaryotic (e.g., bacterial) cells, and eukaryotic cells, including, insect cells, yeast cells and mammalian cells. Viral replication cells may comprise mammalian cells such as HEK293, A549, WEH1, 3T3, 10T1/2, BHK, MDCK, COS 1, COS 7, BSC 1, BSC 40, BMT 10, VERO. W138, HeLa, HEK293, Saos, C2C12, L cells, HT1080, HepG2 and primary fibroblast, hepatocyte and myoblast cells derived from mammals. Viral replication cells of the invention comprise cells derived from mammalian species including, but not limited to, human, monkey, mouse, rat, rabbit, and hamster or cell type, including but not limited to fibroblast, hepatocyte, tumor cell, cell line transformed cell, etc.

### Small Scale Production

[0432] Viral production of the invention disclosed herein describes processes and methods for producing viral particles (e.g., AAV particles and regulatable-AAV particles) that contact a target cell to deliver a payload, e.g. a recombinant viral construct, which comprises a nucleotide encoding a payload.

[0433] In one embodiment, the viral particles (e.g., AAV particles and regulatable-AAV particles) of the invention may be produced in a viral replication cell that comprises a mammalian cell.

[0434] Viral replication cells commonly used for production of recombinant viral particles (e.g., AAV particles and regulatable-AAV particles) include, but is not limited to HEK293 cells, COS cells, HeLa cells, KB cells, and other mammalian cell lines as described in U.S. Pat. Nos. 6,156,303, 5,387,484, 5,741,683, 5,691,176, and 5,688,676; U.S. Patent Publication 2002/0081721, and International Patent Publications WO 00/47757, WO 00/24916, and WO 96/17947, the contents of each of which are herein incorporated by reference in their entireties.

[0435] In one embodiment, viral particles (e.g., AAV particles and regulatable-AAV particles) are produced in mammalian-cells wherein all three VP proteins are expressed at a stoichiometry approaching 1:1:10 (VP1:VP2:VP3). The regulatory mechanisms that allow this controlled level of expression include the production of two mRNAs, one for VP1, and the other for VP2 and VP3, produced by differential splicing.

[0436] In another embodiment, viral particles (e.g., AAV particles and regulatable-AAV particles) are produced in mammalian cells using a triple transfection method. As a non-limiting example, the payload construct, parvoviral Rep, and parvoviral Cap are comprised within three different constructs. The triple transfection method of the three components of AAV particle production may be utilized to produce small lots of virus for assays including transduction efficiency, target tissue (tropism) evaluation, and stability. As a non-limiting example, the triple transfection method includes, a payload construct, a rep/cap and a helper.

### Baculovirus

[0437] Provided herein are processes and methods for producing viral particles (e.g., AAV particles and regulatable-AAV particles) that contact a target cell to deliver a payload construct which comprises a nucleotide encoding a payload.

[0438] Briefly, the viral construct vector and the payload construct vector of the invention are each incorporated by a transposon donor/acceptor system into a bacmid, also known as a baculovirus plasmid, by standard molecular biology techniques known and performed by a person skilled in the art. Transfection of separate viral replication cell populations produces two baculoviruses, one that comprises the viral construct expression vector, and another that comprises the payload construct expression vector. The two baculoviruses may be used to infect a single viral replication cell population for production of particles.

[0439] Baculovirus expression vectors for producing viral particles in insect cells, including but not limited to Spodoptera frugiperda (Sf9) cells, provide high titers of viral particle product. Recombinant baculovirus encoding the viral construct expression vector and payload construct expression vector initiates a productive infection of viral replicating cells. Infectious baculovirus particles released from the primary infection secondarily infect additional cells in the culture, exponentially infecting the entire cell culture population in a number of infection cycles that is a function of the initial multiplicity of infection, see Urabe, M. et al. J Virol. 2006 February; 80 (4):1874-85, the contents of which are herein incorporated by reference in their entirety.

[0440] Production of particles with baculovirus in an insect cell system may address known baculovirus genetic and physical instability. In one embodiment, the production system of the invention addresses baculovirus instability over multiple passages by utilizing a titerless infected-cells preservation and scale-up system. Small scale seed cultures of viral producing cells are transfected with viral expression constructs encoding the structural, non-structural, components of the viral particle. Baculovirus-infected viral producing cells are harvested into aliquots that may be cryopreserved in liquid nitrogen; the aliquots retain viability and infectivity for infection of large scale viral producing cell culture Wasilko D J et al. Protein Expr Purif. 2009 June; 65(2):122-32, the contents of which are herein incorporated by reference in their entirety.

[0441] A genetically stable baculovirus may be used to produce the source of one or more of the components for producing particles in invertebrate cells. In one embodiment, defective baculovirus expression vectors may be maintained episomally in insect cells. In such an embodiment, the bacmid vector is engineered with replication control elements, including but not limited to promoters, enhancers, and/or cell-cycle regulated replication elements.

[0442] In one embodiment, baculoviruses may be engineered with a (non-) selectable marker for recombination into the chitinase/cathepsin locus. The chia/v-cath locus is non-essential for propagating baculovirus in tissue culture, and the V-cath (EC 3.4.22.50) is a cysteine endoprotease that is most active on Arg-Arg dipeptide containing substrates. The Arg-Arg dipeptide is present in densovirus and parvovirus capsid structural proteins but infrequently occurs in dependovirus VP1.

[0443] In one embodiment, stable viral replication cells permissive for baculovirus infection are engineered with at least one stable integrated copy of any of the elements necessary for AAV replication and viral particle production including, but not limited to, the entire AAV genome, Rep and Cap genes, Rep genes, Cap genes, each Rep protein as a separate transcription cassette, each VP protein as a separate transcription cassette, the AAP (assembly activation protein), or at least one of the baculovirus helper genes with native or non-native promoters.

### Large-Scale Production

[0444] In some embodiments, viral particles (e.g., AAV particles and regulatable-AAV particles) production may be modified to increase the scale of production. Large scale viral production methods according to the present invention may include any of those taught in U.S. Pat. Nos. 5,756,283, 6,258,595, 6,261,551, 6,270,996, 6,281,010, 6,365,394, 6,475,769, 6,482,634, 6,485,966, 6,943,019, 6,953,690, 7,022,519, 7,238,526, 7,291,498 and 7,491,508 or International Publication Nos. WO1996039530, WO1998010088, WO1999014354, WO1999015685, WO1999047691, WO2000055342, WO2000075353 and WO2001023597, the contents of each of which are herein incorporated by reference by reference in their entirety. Methods of increasing viral particle production scale typically comprise increasing the number of viral replication cells. In some embodiments, viral replication cells comprise adherent cells. To increase the scale of viral particle production by adherent viral replication cells, larger cell culture surfaces are required. In some cases, large-scale production methods comprise the use of roller bottles to increase cell culture surfaces. Other cell culture substrates with increased surface areas are known in the art. Examples of additional adherent cell culture products with increased surface areas include, but are not limited to CELLSTACK®, CELLCUBE® (Corning Corp., Corning, N.Y.) and NUNC™ CELL FACTORY™ (Thermo Scientific, Waltham, Mass.) In some cases, large-scale adherent cell surfaces may comprise from about 1,000 cm² to about 100,000 cm². In some cases, large-scale adherent cell cultures may comprise from about 10⁷ to about 10⁹ cells, from about 10⁸ to about 10¹⁰ cells, from about 10⁹ to about 10¹² cells or at least 10¹² cells. In some cases, large-scale adherent cultures may produce from about 10⁹ to about 10¹², from about 10¹⁰ to about 10¹³, from about 10¹¹ to about 10¹⁴, from about 10¹² to about 10¹⁵ or at least 10¹⁵ viral particles.

[0445] In some embodiments, large-scale viral production methods of the present invention may comprise the use of suspension cell cultures. Suspension cell culture allows for significantly increased numbers of cells. Typically, the number of adherent cells that can be grown on about 10-50 cm² of surface area can be grown in about 1 cm³ volume in suspension.

[0446] Transfection of replication cells in large-scale culture formats may be carried out according to any methods known in the art. For large-scale adherent cell cultures, transfection methods may include, but are not limited to the use of inorganic compounds (e.g. calcium phosphate,) organic compounds (e.g. polyethylenimine (PEI)) or the use of non-chemical methods (e.g. electroporation). With cells grown in suspension, transfection methods may include, but are not limited to the use of calcium phosphate and the use of PEI. In some cases, transfection of large scale suspension cultures may be carried out according to the section entitled “Transfection Procedure” described in Feng, L. et al., 2008. Biotechnol Appl. Biochem. 50:121-32, the contents of which are herein incorporated by reference in their entirety. According to such embodiments, PEI-DNA complexes may be formed for introduction of plasmids to be transfected. In some cases, cells being transfected with PEI-DNA complexes may be ‘shocked’ prior to transfection. This comprises lowering cell culture temperatures to 4° C. for a period of about 1 hour. In some cases, cell cultures may be shocked for a period of from about 10 minutes to about 5 hours. In some cases, cell cultures may be shocked at a temperature of from about 0° C. to about 20° C.

[0447] In some cases, transfections may include one or more vectors for expression of an RNA effector molecule to reduce expression of nucleic acids expression from one or more viral genomes. Such methods may enhance the production of viral particles by reducing cellular resources wasted on expressing payload constructs. In some cases, such methods may be carried according to those taught in US Publication No. US2014/0099666, the contents of which are herein incorporated by reference in their entirety.

### Bioreactors

[0448] In some embodiments, cell culture bioreactors may be used for large scale viral production. In some cases, bioreactors comprise stirred tank reactors. Such reactors generally comprise a vessel, typically cylindrical in shape, with a stirrer (e.g. impeller.) In some embodiments, such bioreactor vessels may be placed within a water jacket to control vessel temperature and/or to minimize effects from ambient temperature changes. Bioreactor vessel volume may range in size from about 500 ml to about 2 L, from about 1 L to about 5 L, from about 2.5 L to about 20 L, from about 10 L to about 50 L, from about 25 L to about 100 L, from about 75 L to about 500 L, from about 250 L to about 2,000 L, from about 1,000 L to about 10,000 L, from about 5,000 L to about 50,000 L or at least 50,000 L. Vessel bottoms may be rounded or flat. In some cases, animal cell cultures may be maintained in bioreactors with rounded vessel bottoms.

[0449] In some cases, bioreactor vessels may be warmed through the use of a thermocirculator. Thermocirculators pump heated water around water jackets. In some cases, heated water may be pumped through pipes (e.g. coiled pipes) that are present within bioreactor vessels. In some cases, warm air may be circulated around bioreactors, including, but not limited to air space directly above culture medium. Additionally, pH and CO₂ levels may be maintained to optimize cell viability.

[0450] In some cases, bioreactors may comprise hollow-fiber reactors. Hollow-fiber bioreactors may support the culture of both anchorage dependent and anchorage independent cells. Further bioreactors may include, but are not limited to packed-bed or fixed-bed bioreactors. Such bioreactors may comprise vessels with glass beads for adherent cell attachment. Further packed-bed reactors may comprise ceramic beads.

[0451] In some cases, viral particles are produced through the use of a disposable bioreactor. In some embodiments, such bioreactors may include WAVE™ disposable bioreactors.

[0452] In some embodiments, viral particle (e.g., AAV particles and regulatable-AAV particles) production in animal cell bioreactor cultures may be carried out according to the methods taught in U.S. Pat. Nos. 5,064,764, 6,194,191, 6,566,118, 8,137,948 or US Patent Publication No. US2011/0229971, the contents of each of which are herein incorporated by reference in their entirety.

### Cell Lysis

[0453] Cells of the invention, including, but not limited to viral production cells, may be subjected to cell lysis according to any methods known in the art. Cell lysis may be carried out to obtain one or more agents (e.g. viral particles) present within any cells of the invention. In some embodiments, cell lysis may be carried out according to any of the methods listed in U.S. Pat. Nos. 7,326,555, 7,579,181, 7,048,920, 6,410,300, 6,436,394, 7,732,129, 7,510,875, 7,445,930, 6,726,907, 6,194,191, 7,125,706, 6,995,006, 6,676,935, 7,968,333, 5,756,283, 6,258,595, 6,261,551, 6,270,996, 6,281,010, 6,365,394, 6,475,769, 6,482,634, 6,485,966, 6,943,019, 6,953,690, 7,022,519, 7,238,526, 7,291,498 and 7,491,508 or International Publication Nos. WO1996039530, WO1998010088, WO1999014354, WO1999015685, WO1999047691, WO2000055342, WO2000075353 and WO2001023597, the contents of each of which are herein incorporated by reference in their entirety. Cell lysis methods may be chemical or mechanical. Chemical cell lysis typically comprises contacting one or more cells with one or more lysis agent. Mechanical lysis typically comprises subjecting one or more cells to one or more lysis conditions and/or one or more lysis forces.

[0454] In some embodiments, chemical lysis may be used to lyse cells. As used herein, the term “lysis agent” refers to any agent that may aid in the disruption of a cell. In some cases, lysis agents are introduced in solutions, termed lysis solutions or lysis buffers. As used herein, the term “lysis solution” refers to a solution (typically aqueous) comprising one or more lysis agents. In addition to lysis agents, lysis solutions may include one or more buffering agents, solubilizing agents, surfactants, preservatives, cryoprotectants, enzymes, enzyme inhibitors and/or chelators. Lysis buffers are lysis solutions comprising one or more buffering agent. Additional components of lysis solutions may include one or more solubilizing agents. As used herein, the term “solubilizing agent” refers to a compound that enhances the solubility of one or more components of a solution and/or the solubility of one or more entities to which solutions are applied. In some cases, solubilizing agents enhance protein solubility. In some cases, solubilizing agents are selected based on their ability to enhance protein solubility while maintaining protein conformation and/or activity.

[0455] Exemplary lysis agents may include any of those described in U.S. Pat. Nos. 8,685,734, 7,901,921, 7,732,129, 7,223,585, 7,125,706, 8,236,495, 8,110,351, 7,419,956, 7,300,797, 6,699,706 and 6,143,567, the contents of each of which are herein incorporated by reference in their entirety. In some cases, lysis agents may be selected from lysis salts, amphoteric agents, cationic agents, ionic detergents and non-ionic detergents. Lysis salts may include, but are not limited to sodium chloride (NaCl) and potassium chloride (KCl.) Further lysis salts may include any of those described in U.S. Pat. Nos. 8,614,101, 7,326,555, 7,579,181, 7,048,920, 6,410,300, 6,436,394, 7,732,129, 7,510,875, 7,445,930, 6,726,907, 6,194,191, 7,125,706, 6,995,006, 6,676,935 and 7,968,333, the contents of each of which are herein incorporated by reference in their entirety. Concentrations of salts may be increased or decreased to obtain an effective concentration for rupture of cell membranes. Amphoteric agents, as referred to herein, are compounds capable of reacting as an acid or a base. Amphoteric agents may include, but are not limited to lysophosphatidylcholine, 3-((3-Cholamidopropyl) dimethylammonium)-1-propanesulfonate (CHAPS,) ZWITTERGENT® and the like. Cationic agents may include, but are not limited to cetyltrimethylammonium bromide (C (16) TAB) and Benzalkonium chloride. Lysis agents comprising detergents may include ionic detergents or non-ionic detergents. Detergents may function to break apart or dissolve cell structures including, but not limited to cell membranes, cell walls, lipids, carbohydrates, lipoproteins and glycoproteins. Exemplary ionic detergents include any of those taught in U.S. Pat. Nos. 7,625,570 and 6,593,123 or US Publication No. US2014/0087361, the contents of each of which are herein incorporated by reference in their entirety. Some ionic detergents may include, but are not limited to sodium dodecyl sulfate (SDS), cholate and deoxycholate. In some cases, ionic detergents may be included in lysis solutions as a solubilizing agent. Non-ionic detergents may include, but are not limited to octylglucoside, digitonin, lubrol, C12E8, TWEEN®-20, TWEEN®-80, Triton X-100 and Noniodet P-40. Non-ionic detergents are typically weaker lysis agents, but may be included as solubilizing agents for solubilizing cellular and/or viral proteins. Further lysis agents may include enzymes and urea. In some cases, one or more lysis agents may be combined in a lysis solution in order to enhance one or more of cell lysis and protein solubility. In some cases, enzyme inhibitors may be included in lysis solutions in order to prevent proteolysis that may be triggered by cell membrane disruption.

[0456] In some embodiments, mechanical cell lysis is carried out. Mechanical cell lysis methods may include the use of one or more lysis condition and/or one or more lysis force. As used herein, the term “lysis condition” refers to a state or circumstance that promotes cellular disruption. Lysis conditions may comprise certain temperatures, pressures, osmotic purity, salinity and the like. In some cases, lysis conditions comprise increased or decreased temperatures. According to some embodiments, lysis conditions comprise changes in temperature to promote cellular disruption. Cell lysis carried out according to such embodiments may include freeze-thaw lysis. As used herein, the term “freeze-thaw lysis” refers to cellular lysis in which a cell solution is subjected to one or more freeze-thaw cycle. According to freeze-thaw lysis methods, cells in solution are frozen to induce a mechanical disruption of cellular membranes caused by the formation and expansion of ice crystals. Cell solutions used according to freeze-thaw lysis methods, may further comprise one or more lysis agents, solubilizing agents, buffering agents, cryoprotectants, surfactants, preservatives, enzymes, enzyme inhibitors and/or chelators. Once cell solutions subjected to freezing are thawed, such components may enhance the recovery of desired cellular products. In some cases, one or more cyroprotectants are included in cell solutions undergoing freeze-thaw lysis. As used herein, the term “cryoprotectant” refers to an agent used to protect one or more substance from damage due to freezing. Cryoprotectants of the invention may include any of those taught in US Publication No. US2013/0323302 or U.S. Pat. Nos. 6,503,888, 6,180,613, 7,888,096, 7,091,030, the contents of each of which are herein incorporated by reference in their entirety. In some cases, cryoprotectants may include, but are not limited to dimethyl sulfoxide, 1,2-propanediol, 2,3-butanediol, formamide, glycerol, ethylene glycol, 1,3-propanediol and n-dimethyl formamide, polyvinylpyrrolidone, hydroxyethyl starch, agarose, dextrans, inositol, glucose, hydroxyethylstarch, lactose, sorbitol, methyl glucose, sucrose and urea. In some embodiments, freeze-thaw lysis may be carried out according to any of the methods described in U.S. Pat. No. 7,704,721, the contents of which are herein incorporated by reference in their entirety.

[0457] As used herein, the term “lysis force” refers to a physical activity used to disrupt a cell. Lysis forces may include, but are not limited to mechanical forces, sonic forces, gravitational forces, optical forces, electrical forces and the like. Cell lysis carried out by mechanical force is referred to herein as “mechanical lysis.” Mechanical forces that may be used according to mechanical lysis may include high shear fluid forces. According to such methods of mechanical lysis, a microfluidizer may be used. Microfluidizers typically comprise an inlet reservoir where cell solutions may be applied. Cell solutions may then be pumped into an interaction chamber via a pump (e.g. high-pressure pump) at high speed and/or pressure to produce shear fluid forces. Resulting lysates may then be collected in one or more output reservoirs. Pump speed and/or pressure may be adjusted to modulate cell lysis and enhance recovery of products (e.g. viral particles.) Other mechanical lysis methods may include physical disruption of cells by scraping.

[0458] Cell lysis methods may be selected based on the cell culture format of cells to be lysed. For example, with adherent cell cultures, some chemical and mechanical lysis methods may be used. Such mechanical lysis methods may include freeze-thaw lysis or scraping. In another example, chemical lysis of adherent cell cultures may be carried out through incubation with lysis solutions comprising surfactant, such as Triton-X-100. In some cases, cell lysates generated from adherent cell cultures may be treated with one more nucleases to lower the viscosity of the lysates caused by liberated DNA.

[0459] In one embodiment, a method for harvesting viral particles (e.g., AAV particles and regulatable-AAV particles) without lysis may be used for efficient and scalable viral particle production. In a non-limiting example, viral particles (e.g., AAV particles and regulatable-AAV particles) may be produced by culturing a viral particle lacking a heparin binding site, thereby allowing the viral particle to pass into the supernatant, in a cell culture, collecting supernatant from the culture; and isolating the viral particle from the supernatant, as described in US Patent Publication No. 20090275107, the contents of which is incorporated herein by reference in its entirety.

### Clarification

[0460] Cell lysates comprising viral particles (e.g., AAV particles and regulatable-AAV particles) may be subjected to clarification. Clarification refers to initial steps taken in purification of viral particles from cell lysates. Clarification serves to prepare lysates for further purification by removing larger, insoluble debris. Clarification steps may include, but are not limited to centrifugation and filtration. During clarification, centrifugation may be carried out at low speeds to remove larger debris, only. Similarly, filtration may be carried out using filters with larger pore sizes so that only larger debris is removed. In some cases, tangential flow filtration may be used during clarification. Objectives of viral clarification include high throughput processing of cell lysates and to optimize ultimate viral recovery. Advantages of including a clarification step include scalability for processing of larger volumes of lysate. In some embodiments, clarification may be carried out according to any of the methods presented in U.S. Pat. Nos. 8,524,446, 5,756,283, 6,258,595, 6,261,551, 6,270,996, 6,281,010, 6,365,394, 6,475,769, 6,482,634, 6,485,966, 6,943,019, 6,953,690, 7,022,519, 7,238,526, 7,291,498, 7,491,508, US Publication Nos. US2013/0045186, US2011/0263027, US2011/0151434, US2003/0138772, and International Publication Nos. WO2002012455, WO1996039530, WO1998010088, WO1999014354, WO1999015685, WO1999047691, WO2000055342, WO2000075353 and WO2001023597, the contents of each of which are herein incorporated by reference in their entirety.

[0461] Methods of cell lysate clarification by filtration are well understood in the art and may be carried out according to a variety of available methods including, but not limited to passive filtration and flow filtration. Filters used may comprise a variety of materials and pore sizes. For example, cell lysate filters may comprise pore sizes of from about 1 μM to about 5 μM, from about 0.5 μM to about 2 μM, from about 0.1 μM to about 1 μM, from about 0.05 μM to about 0.05 μM and from about 0.001 μM to about 0.1 μM. Exemplary pore sizes for cell lysate filters may include, but are not limited to, 2.0, 1.9, 1.8, 1.7, 1.6, 1.5, 1.4, 1.3, 1.2, 1.1, 1, 0.9, 0.8, 0.7, 0.6, 0.5, 0.4, 0.3, 0.2, 0.1, 0.95, 0.9, 0.85, 0.8, 0.75, 0.7, 0.65, 0.6, 0.55, 0.5, 0.45, 0.4, 0.35, 0.3, 0.25, 0.2, 0.15, 0.1, 0.05, 0.22, 0.21, 0.20, 0.19, 0.18, 0.17, 0.16, 0.15, 0.14, 0.13, 0.12, 0.11, 0.1, 0.09, 0.08, 0.07, 0.06, 0.05, 0.04, 0.03, 0.02, 0.01, 0.02, 0.019, 0.018, 0.017, 0.016, 0.015, 0.014, 0.013, 0.012, 0.011, 0.01, 0.009, 0.008, 0.007, 0.006, 0.005, 0.004, 0.003, 0.002, 0.001 and 0.001 μM. In one embodiment, clarification may comprise filtration through a filter with 2.0 μM pore size to remove large debris, followed by passage through a filter with 0.45 μM pore size to remove intact cells.

[0462] Filter materials may be composed of a variety of materials. Such materials may include, but are not limited to polymeric materials and metal materials (e.g. sintered metal and pored aluminum.) Exemplary materials may include, but are not limited to nylon, cellulose materials (e.g. cellulose acetate), polyvinylidene fluoride (PVDF), polyethersulfone, polyamide, polysulfone, polypropylene, and polyethylene terephthalate. In some cases, filters useful for clarification of cell lysates may include, but are not limited to ULTIPLEAT PROFILE™ filters (Pall Corporation, Port Washington, N.Y.), SUPOR™ membrane filters (Pall Corporation, Port Washington, N.Y.)

[0463] In some cases, flow filtration may be carried out to increase filtration speed and/or effectiveness. In some cases, flow filtration may comprise vacuum filtration. According to such methods, a vacuum is created on the side of the filter opposite that of cell lysate to be filtered. In some cases, cell lysates may be passed through filters by centrifugal forces. In some cases, a pump is used to force cell lysate through clarification filters. Flow rate of cell lysate through one or more filters may be modulated by adjusting channel size and/or fluid pressure.

[0464] According to some embodiments, cell lysates may be clarified by centrifugation. Centrifugation may be used to pellet insoluble particles in the lysate. During clarification, centrifugation strength [expressed in terms of gravitational units (g), which represents multiples of standard gravitational force] may be lower than in subsequent purification steps. In some cases, centrifugation may be carried out on cell lysates at from about 200 g to about 800 g, from about 500 g to about 1500 g, from about 1000 g to about 5000 g, from about 1200 g to about 10000 g or from about 8000 g to about 15000 g. In some embodiments, cell lysate centrifugation is carried out at 8000 g for 15 minutes. In some cases, density gradient centrifugation may be carried out in order to partition particulates in the cell lysate by sedimentation rate. Gradients used according to methods of the present invention may include, but are not limited to cesium chloride gradients and iodixanol step gradients.

### Purification: Chromatography

[0465] In some embodiments, viral particles (e.g., AAV particles and regulatable-AAV particles) may be purified from clarified cell lysates by one or more methods of chromatography. Chromatography refers to any number of methods known in the art for separating out one or more elements from a mixture. Such methods may include, but are not limited to ion exchange chromatography (e.g. cation exchange chromatography and anion exchange chromatography), immunoaffinity chromatography and size-exclusion chromatography. In some embodiments, methods of viral chromatography may include any of those taught in U.S. Pat. Nos. 5,756,283, 6,258,595, 6,261,551, 6,270,996, 6,281,010, 6,365,394, 6,475,769, 6,482,634, 6,485,966, 6,943,019, 6,953,690, 7,022,519, 7,238,526, 7,291,498 and 7,491,508 or International Publication Nos. WO1996039530, WO1998010088, WO1999014354, WO1999015685, WO1999047691, WO2000055342, WO2000075353 and WO2001023597, the contents of each of which are herein incorporated by reference by reference in their entirety.

[0466] In some embodiments, ion exchange chromatography may be used to isolate viral particles. Ion exchange chromatography is used to bind viral particles based on charge-charge interactions between capsid proteins and charged sites present on a stationary phase, typically a column through which viral preparations (e.g. clarified lysates) are passed. After application of viral preparations, bound viral particles may then be eluted by applying an elution solution to disrupt the charge-charge interactions. Elution solutions may be optimized by adjusting salt concentration and/or pH to enhance recovery of bound viral particles. Depending on the charge of viral capsids being isolated, cation or anion exchange chromatography methods may be selected. Methods of ion exchange chromatography may include, but are not limited to any of those taught in U.S. Pat. Nos. 7,419,817, 6,143,548, 7,094,604, 6,593,123, 7,015,026 and 8,137,948, the contents of each of which are herein incorporated by reference in their entirety.

[0467] In some embodiments, immunoaffinity chromatography may be used. Immunoaffinity chromatography is a form of chromatography that utilizes one or more immune compounds (e.g. antibodies or antibody-related structures) to retain viral particles. Immune compounds may bind specifically to one or more structures on viral particle surfaces, including, but not limited to one or more viral coat proteins. In some cases, immune compounds may be specific for a particular viral variant. In some cases, immune compounds may bind to multiple viral variants. In some embodiments, immune compounds may include recombinant single-chain antibodies. Such recombinant single chain antibodies may include those described in Smith, R. H. et al., 2009. Mol. Ther. 17(11):1888-96, the contents of which are herein incorporated by reference in their entirety. Such immune compounds are capable of binding to several AAV capsid variants, including, but not limited to AAV1, AAV2, AAV6 and AAV8.

[0468] In some embodiments, size-exclusion chromatography (SEC) may be used. SEC may comprise the use of a gel to separate particles according to size. In viral particle purification, SEC filtration is sometimes referred to as “polishing.” In some cases, SEC may be carried out to generate a final product that is near-homogenous. Such final products may in some cases be used in pre-clinical studies and/or clinical studies (Kotin, R. M. 2011. Human Molecular Genetics. 20(1):R2-R6, the contents of which are herein incorporated by reference in their entirety.) In some cases, SEC may be carried out according to any of the methods taught in U.S. Pat. Nos. 6,143,548, 7,015,026, 8,476,418, 6,410,300, 8,476,418, 7,419,817, 7,094,604, 6,593,123, and 8,137,948, the contents of each of which are herein incorporated by reference in their entirety.

[0469] In one embodiment, the compositions comprising at least one viral particle (e.g., AAV particle and regulatable-AAV particle) may be isolated or purified using the methods described in U.S. Pat. No. 6,146,874, the contents of which are herein incorporated by reference in its entirety.

[0470] In one embodiment, the compositions comprising at least one re viral particle (e.g., AAV particle and regulatable-AAV particle) may be isolated or purified using the methods described in U.S. Pat. No. 6,660,514, the contents of which are herein incorporated by reference in its entirety.

[0471] In one embodiment, the compositions comprising at least one viral particle (e.g., AAV particle and regulatable-AAV particle) may be isolated or purified using the methods described in U.S. Pat. No. 8,283,151, the contents of which are herein incorporated by reference in its entirety.

[0472] In one embodiment, the compositions comprising at least one viral particle (e.g., AAV particle and regulatable-AAV particle) may be isolated or purified using the methods described in U.S. Pat. No. 8,524,446, the contents of which are herein incorporated by reference in its entirety.

### Formulation and Delivery

[0473] According to the present invention the viral particles (e.g., AAV particles or regulatable-AAV particles) may be prepared as pharmaceutical compositions. It will be understood that such compositions necessarily comprise one or more active ingredients and, most often, a pharmaceutically acceptable excipient.

[0474] Relative amounts of the active ingredient (e.g. AAV particle or regulatable-AAV particle), a pharmaceutically acceptable excipient, and/or any additional ingredients in a pharmaceutical composition in accordance with the present disclosure may vary, depending upon the identity, size, and/or condition of the subject being treated and further depending upon the route by which the composition is to be administered. For example, the composition may comprise between 0.1% and 99% (w/w) of the active ingredient. By way of example, the composition may comprise between 0.1% and 100%, e.g., between 0.5 and 50%, between 1-30%, between 5-80%, at least 80% (w/w) active ingredient.

[0475] In some embodiments, the viral particles (e.g., AAV particle or regulatable-AAV particle) pharmaceutical compositions described herein may comprise at least one payload. As a non-limiting example, the pharmaceutical compositions may contain a viral particle with 1, 2, 3, 4 or 5 payloads.

[0476] Although the descriptions of pharmaceutical compositions provided herein are principally directed to pharmaceutical compositions which are suitable for administration to humans, it will be understood by the skilled artisan that such compositions are generally suitable for administration to any other animal, e.g., to non-human animals, e.g. non-human mammals. Modification of pharmaceutical compositions suitable for administration to humans in order to render the compositions suitable for administration to various animals is well understood, and the ordinarily skilled veterinary pharmacologist can design and/or perform such modification with merely ordinary, if any, experimentation. Subjects to which administration of the pharmaceutical compositions is contemplated include, but are not limited to, humans and/or other primates; mammals, including commercially relevant mammals such as cattle, pigs, horses, sheep, cats, dogs, mice, rats, birds, including commercially relevant birds such as poultry, chickens, ducks, geese, and/or turkeys.

[0477] In some embodiments, compositions are administered to humans, human patients or subjects.

[0478] In some embodiments, the chemical agent (e.g., drug, compound or ligand) may be formulated for delivery. The delivery compositions may comprise a pharmaceutically acceptable carrier or excipient and optionally a suitable adjuvant and may be administered via routes described in the art including but not limited to inhalation, insufflation, oral, buccal, parenteral, rectal, or transdermal.

[0479] In one embodiment, the present invention also provides pharmaceutical compositions comprising at least one viral particle (e.g., AAV particle or regulatable-AAV particle) having a regulatable element and a pharmaceutically acceptable excipient. In some aspects, one or more regulatable elements are contained in a viral particle (e.g., AAV particle or regulatable-AAV particle).

### Formulations

[0480] The viral particles (e.g., AAV particles or regulatable-AAV particles) of the invention can be formulated using one or more excipients to: (1) increase stability; (2) increase cell transfection or transduction; (3) permit the sustained or delayed expression of the payload; (4) alter the biodistribution (e.g., target the viral particle to specific tissues or cell types); (5) increase the translation of encoded protein; (6) alter the release profile of encoded protein and/or (7) allow for regulatable expression of the payload.

[0481] Formulations of the present invention can include, without limitation, saline, liposomes, lipid nanoparticles, polymers, peptides, proteins, cells transfected with viral genomes (e.g., for transfer or transplantation into a subject) and combinations thereof.

[0482] Formulations of the pharmaceutical compositions described herein may be prepared by any method known or hereafter developed in the art of pharmacology. As used herein the term “pharmaceutical composition” refers to compositions comprising at least one active ingredient and optionally one or more pharmaceutically acceptable excipients.

[0483] In general, such preparatory methods include the step of associating the active ingredient with an excipient and/or one or more other accessory ingredients. As used herein, the phrase “active ingredient” generally refers either to a viral particle (e.g., AAV particle or regulatable-AAV particle) carrying a payload region encoding the polypeptides of the invention.

[0484] Formulations of the viral particles (e.g., AAV particles or regulatable-AAV particles) and pharmaceutical compositions described herein may be prepared by any method known or hereafter developed in the art of pharmacology. In general, such preparatory methods include the step of bringing the active ingredient into association with an excipient and/or one or more other accessory ingredients, and then, if necessary and/or desirable, dividing, shaping and/or packaging the product into a desired single- or multi-dose unit.

[0485] A pharmaceutical composition in accordance with the present disclosure may be prepared, packaged, and/or sold in bulk, as a single unit dose, and/or as a plurality of single unit doses. As used herein, a “unit dose” refers to a discrete amount of the pharmaceutical composition comprising a predetermined amount of the active ingredient. The amount of the active ingredient is generally equal to the dosage of the active ingredient which would be administered to a subject and/or a convenient fraction of such a dosage such as, for example, one-half or one-third of such a dosage.

[0486] In one embodiment, the viral particle (e.g., AAV particle or regulatable-AAV particle) of the invention may be formulated in PBS with 0.001% of pluronic acid (F-68) at a pH of about 7.0.

[0487] In some embodiments, the formulations described herein may contain sufficient viral particles (e.g., AAV particles or regulatable-AAV particles) for expression of at least one expressed payload. As a non-limiting example, the viral particles (e.g., AAV particles or regulatable-AAV particles) may contain viral genomes encoding 1, 2, 3, 4 or 5 payloads. In one embodiment, the formulation may contain a payload encoding proteins selected from categories such as, but not limited to, human proteins, veterinary proteins, bacterial proteins, biological proteins, antibodies, immunogenic proteins, therapeutic peptides and proteins, secreted proteins, plasma membrane proteins, cytoplasmic and cytoskeletal proteins, intracellular membrane bound proteins, nuclear proteins, proteins associated with human disease and/or proteins associated with non-human diseases.

[0488] According to the present invention, viral particles (e.g., AAV particles or regulatable-AAV particles) may be formulated for CNS delivery. Agents that cross the brain blood barrier may be used. For example, some cell penetrating peptides that can target molecules to the brain blood barrier endothelium may be used for formulation (e.g., Mathupala, Expert Opin Ther Pat., 2009, 19, 137-140; the content of which is incorporated herein by reference in its entirety).

[0489] In one embodiment, the viral particle may also encode a cell penetrating peptide. Delivery of a fusion protein comprising a recombinase and a cell penetrating peptide, the use of which is contemplated in one aspect of the current invention, is described in US Publication No. US20140127162, the contents of which is herein incorporated by reference in its entirety. Cell penetrating peptides are well known in the art and are for example described in Lundberg et al. (2002) A brief introduction to cell-penetrating peptides, J. Mol. Recognit. 16: 227-233, the contents of which is herein incorporated by reference in its entirety.

### Excipients and Diluents

[0490] The viral particles (e.g., AAV particles or regulatable-AAV particles) of the invention can be formulated using one or more excipients or diluents to (1) increase stability; (2) increase cell transfection or transduction; (3) permit the sustained or delayed release; (4) alter the biodistribution (e.g., target the viral particle to specific tissues or cell types); (5) increase the translation of encoded protein in vivo; (6) alter the release profile of encoded protein in vivo and/or (7) allow for regulatable expression of the polypeptides of the invention.

[0491] In some embodiments, a pharmaceutically acceptable excipient may be at least 95%, at least 96%, at least 97%, at least 98%, at least 99%, or 100% pure. In some embodiments, an excipient is approved for use for humans and for veterinary use. In some embodiments, an excipient may be approved by United States Food and Drug Administration. In some embodiments, an excipient may be of pharmaceutical grade. In some embodiments, an excipient may meet the standards of the United States Pharmacopoeia (USP), the European Pharmacopoeia (EP), the British Pharmacopoeia, and/or the International Pharmacopoeia.

[0492] Excipients, as used herein, include, but are not limited to, any and all solvents, dispersion media, diluents, or other liquid vehicles, dispersion or suspension aids, surface active agents, isotonic agents, thickening or emulsifying agents, preservatives, and the like, as suited to the particular dosage form desired. Various excipients for formulating pharmaceutical compositions and techniques for preparing the composition are known in the art (see Remington: The Science and Practice of Pharmacy, 21st Edition, A. R. Gennaro, Lippincott, Williams & Wilkins, Baltimore, Md., 2006; incorporated herein by reference in its entirety). The use of a conventional excipient medium may be contemplated within the scope of the present disclosure, except insofar as any conventional excipient medium may be incompatible with a substance or its derivatives, such as by producing any undesirable biological effect or otherwise interacting in a deleterious manner with any other component(s) of the pharmaceutical composition.

[0493] Exemplary diluents include, but are not limited to, calcium carbonate, sodium carbonate, calcium phosphate, dicalcium phosphate, calcium sulfate, calcium hydrogen phosphate, sodium phosphate lactose, sucrose, cellulose, microcrystalline cellulose, kaolin, mannitol, sorbitol, inositol, sodium chloride, dry starch, cornstarch, powdered sugar, etc., and/or combinations thereof.

### Inactive Ingredients

[0494] In some embodiments, viral particle (e.g., AAV particle or regulatable-AAV particle) formulations may comprise at least one inactive ingredient. As used herein, the term “inactive ingredient” refers to one or more agents that do not contribute to the activity of the active ingredient of the pharmaceutical composition included in formulations. In some embodiments, all, none or some of the inactive ingredients which may be used in the formulations of the present invention may be approved by the US Food and Drug Administration (FDA).

[0495] In one embodiment, the viral particle pharmaceutical compositions comprise at least one inactive ingredient such as, but not limited to, 1,2,6-Hexanetriol; 1,2-Dimyristoyl-Sn-Glycero-3-(Phospho-S-(1-Glycerol)); 1,2-Dimyristoyl-Sn-Glycero-3-Phosphocholine; 1,2-Dioleoyl-Sn-Glycero-3-Phosphocholine; 1,2-Dipalmitoyl-Sn-Glycero-3-(Phospho-Rac-(1-Glycerol)); 1,2-Distearoyl-Sn-Glycero-3-(Phospho-Rac-(1-Glycerol)); 1,2-Distearoyl-Sn-Glycero-3-Phosphocholine; 1-O-Tolylbiguanide; 2-Ethyl-1,6-Hexanediol; Acetic Acid; Acetic Acid, Glacial; Acetic Anhydride; Acetone; Acetone Sodium Bisulfite; Acetylated Lanolin Alcohols; Acetylated Monoglycerides; Acetylcysteine; Acetyltryptophan, DL-; Acrylates Copolymer; Acrylic Acid-Isooctyl Acrylate Copolymer; Acrylic Adhesive 788; Activated Charcoal; Adcote 72A103; Adhesive Tape; Adipic Acid; Aerotex Resin 3730; Alanine; Albumin Aggregated; Albumin Colloidal; Albumin Human; Alcohol; Alcohol, Dehydrated; Alcohol, Denatured; Alcohol, Diluted; Alfadex; Alginic Acid; Alkyl Ammonium Sulfonic Acid Betaine; Alkyl Aryl Sodium Sulfonate; Allantoin; Allyl .Alpha.-Ionone; Almond Oil; Alpha-Terpineol; Alpha-Tocopherol; Alpha-Tocopherol Acetate, Dl-; Alpha-Tocopherol, Dl-; Aluminum Acetate; Aluminum Chlorhydroxy Allantoinate; Aluminum Hydroxide; Aluminum Hydroxide—Sucrose, Hydrated; Aluminum Hydroxide Gel; Aluminum Hydroxide Gel F 500; Aluminum Hydroxide Gel F 5000; Aluminum Monostearate; Aluminum Oxide; Aluminum Polyester; Aluminum Silicate; Aluminum Starch Octenylsuccinate; Aluminum Stearate; Aluminum Subacetate; Aluminum Sulfate Anhydrous; Amerchol C; Amerchol-Cab; Aminomethylpropanol; Ammonia; Ammonia Solution; Ammonia Solution, Strong; Ammonium Acetate; Ammonium Hydroxide; Ammonium Lauryl Sulfate; Ammonium Nonoxynol-4 Sulfate; Ammonium Salt Of C-12-C-15 Linear Primary Alcohol Ethoxylate; Ammonium Sulfate; Ammonyx; Amphoteric-2; Amphoteric-9; Anethole; Anhydrous Citric Acid; Anhydrous Dextrose; Anhydrous Lactose; Anhydrous Trisodium Citrate; Aniseed Oil; Anoxid Sbn; Antifoam; Antipyrine; Apaflurane; Apricot Kernel Oil Peg-6 Esters; Aquaphor; Arginine; Arlacel; Ascorbic Acid; Ascorbyl Palmitate; Aspartic Acid; Balsam Peru; Barium Sulfate; Beeswax; Beeswax, Synthetic; Beheneth-10; Bentonite; Benzalkonium Chloride; Benzenesulfonic Acid; Benzethonium Chloride; Benzododecinium Bromide; Benzoic Acid; Benzyl Alcohol; Benzyl Benzoate; Benzyl Chloride; Betadex; Bibapcitide; Bismuth Subgallate; Boric Acid; Brocrinat; Butane; Butyl Alcohol; Butyl Ester Of Vinyl Methyl Ether/Maleic Anhydride Copolymer (125000 Mw); Butyl Stearate; Butylated Hydroxyanisole; Butylated Hydroxytoluene; Butylene Glycol; Butylparaben; Butyric Acid; C20-40 Pareth-24; Caffeine; Calcium; Calcium Carbonate; Calcium Chloride; Calcium Gluceptate; Calcium Hydroxide; Calcium Lactate; Calcobutrol; Caldiamide Sodium; Caloxetate Trisodium; Calteridol Calcium; Canada Balsam; Caprylic/Capric Triglyceride; Caprylic/Capric/Stearic Triglyceride; Captan; Captisol; Caramel; Carbomer 1342; Carbomer 1382; Carbomer 934; Carbomer 934p; Carbomer 940; Carbomer 941; Carbomer 980; Carbomer 981; Carbomer Homopolymer Type B (Allyl Pentaerythritol Crosslinked); Carbomer Homopolymer Type C (Allyl Pentaerythritol Crosslinked); Carbon Dioxide; Carboxy Vinyl Copolymer; Carboxymethylcellulose; Carboxymethylcellulose Sodium; Carboxypolymethylene; Carrageenan; Carrageenan Salt; Castor Oil; Cedar Leaf Oil; Cellulose; Cellulose, Microcrystalline; Cerasynt-Se; Ceresin; Ceteareth-12; Ceteareth-15; Ceteareth-30; Cetearyl Alcohol/Ceteareth-20; Cetearyl Ethylhexanoate; Ceteth-10; Ceteth-2; Ceteth-20; Ceteth-23; Cetostearyl Alcohol; Cetrimonium Chloride; Cetyl Alcohol; Cetyl Esters Wax; Cetyl Palmitate; Cetylpyridinium Chloride; Chlorobutanol; Chlorobutanol Hemihydrate; Chlorobutanol, Anhydrous; Chlorocresol; Chloroxylenol; Cholesterol; Choleth; Choleth-24; Citrate; Citric Acid; Citric Acid Monohydrate; Citric Acid, Hydrous; Cocamide Ether Sulfate; Cocamine Oxide; Coco Betaine; Coco Diethanolamide; Coco Monoethanolamide; Cocoa Butter; Coco-Glycerides; Coconut Oil; Coconut Oil, Hydrogenated; Coconut Oil/Palm Kernel Oil Glycerides, Hydrogenated; Cocoyl Caprylocaprate; Cola Nitida Seed Extract; Collagen; Coloring Suspension; Corn Oil; Cottonseed Oil; Cream Base; Creatine; Creatinine; Cresol; Croscarmellose Sodium; Crospovidone; Cupric Sulfate; Cupric Sulfate Anhydrous; Cyclomethicone; Cyclomethicone/Dimethicone Copolyol; Cysteine; Cysteine Hydrochloride; Cysteine Hydrochloride Anhydrous; Cysteine, Dl-; D&C Red No. 28; D&C Red No. 33; D&C Red No. 36; D&C Red No. 39; D&C Yellow No. 10; Dalfampridine; Daubert 1-5 Pestr (Matte) 164z; Decyl Methyl Sulfoxide; Dehydag Wax Sx; Dehydroacetic Acid; Dehymuls E; Denatonium Benzoate; Deoxycholic Acid; Dextran; Dextran 40; Dextrin; Dextrose; Dextrose Monohydrate; Dextrose Solution; Diatrizoic Acid; Diazolidinyl Urea; Dichlorobenzyl Alcohol; Dichlorodifluoromethane; Dichlorotetrafluoroethane; Diethanolamine; Diethyl Pyrocarbonate; Diethyl Sebacate; Diethylene Glycol Monoethyl Ether; Diethylhexyl Phthalate; Dihydroxyaluminum Aminoacetate; Diisopropanolamine; Diisopropyl Adipate; Diisopropyl Dilinoleate; Dimethicone 350; Dimethicone Copolyol; Dimethicone Mdx4-4210; Dimethicone Medical Fluid 360; Dimethyl Isosorbide; Dimethyl Sulfoxide; Dimethylaminoethyl Methacrylate—Butyl Methacrylate—Methyl Methacrylate Copolymer; Dimethyldioctadecylammonium Bentonite; Dimethylsiloxane/Methylvinylsiloxane Copolymer; Dinoseb Ammonium Salt; Dipalmitoylphosphatidylglycerol, Dl-; Dipropylene Glycol; Disodium Cocoamphodiacetate; Disodium Laureth Sulfosuccinate; Disodium Lauryl Sulfosuccinate; Disodium Sulfosalicylate; Disofenin; Divinylbenzene Styrene Copolymer; Dmdm Hydantoin; Docosanol; Docusate Sodium; Duro-Tak 280-2516; Duro-Tak 387-2516; Duro-Tak 80-1196; Duro-Tak 87-2070; Duro-Tak 87-2194; Duro-Tak 87-2287; Duro-Tak 87-2296; Duro-Tak 87-2888; Duro-Tak 87-2979; Edetate Calcium Disodium; Edetate Disodium; Edetate Disodium Anhydrous; Edetate Sodium; Edetic Acid; Egg Phospholipids; Entsufon; Entsufon Sodium; Epilactose; Epitetracycline Hydrochloride; Essence Bouquet 9200; Ethanolamine Hydrochloride; Ethyl Acetate; Ethyl Oleate; Ethylcelluloses; Ethylene Glycol; Ethylene Vinyl Acetate Copolymer; Ethylenediamine; Ethylenediamine Dihydrochloride; Ethylene-Propylene Copolymer; Ethylene-Vinyl Acetate Copolymer (28% Vinyl Acetate); Ethylene-Vinyl Acetate Copolymer (9% Vinylacetate); Ethylhexyl Hydroxystearate; Ethylparaben; Eucalyptol; Exametazime; Fat, Edible; Fat, Hard; Fatty Acid Esters; Fatty Acid Pentaerythriol Ester; Fatty Acids; Fatty Alcohol Citrate; Fatty Alcohols; Fd&C Blue No. 1; Fd&C Green No. 3; Fd&C Red No. 4; Fd&C Red No. 40; Fd&C Yellow No. 10 (Delisted); Fd&C Yellow No. 5; Fd&C Yellow No. 6; Ferric Chloride; Ferric Oxide; Flavor 89-186; Flavor 89-259; Flavor Df-119; Flavor Df-1530; Flavor Enhancer; Flavor Fig 827118; Flavor Raspberry Pfc-8407; Flavor Rhodia Pharmaceutical No. Rf 451; Fluorochlorohydrocarbons; Formaldehyde; Formaldehyde Solution; Fractionated Coconut Oil; Fragrance 3949-5; Fragrance 520a; Fragrance 6.007; Fragrance 91-122; Fragrance 9128-Y; Fragrance 93498g; Fragrance Balsam Pine No. 5124; Fragrance Bouquet 10328; Fragrance Chemoderm 6401-B; Fragrance Chemoderm 6411; Fragrance Cream No. 73457; Fragrance Cs-28197; Fragrance Felton 066m; Fragrance Firmenich 47373; Fragrance Givaudan Ess 9090/1c; Fragrance H-6540; Fragrance Herbal 10396; Fragrance Nj-1085; Fragrance P O F1-147; Fragrance Pa 52805; Fragrance Pera Derm D; Fragrance Rbd-9819; Fragrance Shaw Mudge U-7776; Fragrance Tf 044078; Fragrance Ungerer Honeysuckle K 2771; Fragrance Ungerer N5195; Fructose; Gadolinium Oxide; Galactose; Gamma Cyclodextrin; Gelatin; Gelatin, Crosslinked; Gelfoam Sponge; Gellan Gum (Low Acyl); Gelva 737; Gentisic Acid; Gentisic Acid Ethanolamide; Gluceptate Sodium; Gluceptate Sodium Dihydrate; Gluconolactone; Glucuronic Acid; Glutamic Acid, Dl-; Glutathione; Glycerin; Glycerol Ester Of Hydrogenated Rosin; Glyceryl Citrate; Glyceryl Isostearate; Glyceryl Laurate; Glyceryl Monostearate; Glyceryl Oleate; Glyceryl Oleate/Propylene Glycol; Glyceryl Palmitate; Glyceryl Ricinoleate; Glyceryl Stearate; Glyceryl Stearate—Laureth-23; Glyceryl Stearate/Peg Stearate; Glyceryl Stearate/Peg-100 Stearate; Glyceryl Stearate/Peg-40 Stearate; Glyceryl Stearate-Stearamidoethyl Diethylamine; Glyceryl Trioleate; Glycine; Glycine Hydrochloride; Glycol Distearate; Glycol Stearate; Guanidine Hydrochloride; Guar Gum; Hair Conditioner (18n195-1m); Heptane; Hetastarch; Hexylene Glycol; High Density Polyethylene; Histidine; Human Albumin Microspheres; Hyaluronate Sodium; Hydrocarbon; Hydrocarbon Gel, Plasticized; Hydrochloric Acid; Hydrochloric Acid, Diluted; Hydrocortisone; Hydrogel Polymer; Hydrogen Peroxide; Hydrogenated Castor Oil; Hydrogenated Palm Oil; Hydrogenated Palm/Palm Kernel Oil Peg-6 Esters; Hydrogenated Polybutene 635-690; Hydroxide Ion; Hydroxyethyl Cellulose; Hydroxyethylpiperazine Ethane Sulfonic Acid; Hydroxymethyl Cellulose; Hydroxyoctacosanyl Hydroxystearate; Hydroxypropyl Cellulose; Hydroxypropyl Methylcellulose 2906; Hydroxypropyl-Beta-cyclodextrin; Hypromellose 2208 (15000 Mpa·S); Hypromellose 2910 (15000 Mpa·S); Hypromelloses; Imidurea; Iodine; lodoxamic Acid; Iofetamine Hydrochloride; Irish Moss Extract; Isobutane; Isoceteth-20; Isoleucine; Isooctyl Acrylate; Isopropyl Alcohol; Isopropyl Isostearate; Isopropyl Myristate; Isopropyl Myristate—Myristyl Alcohol; Isopropyl Palmitate; Isopropyl Stearate; Isostearic Acid; Isostearyl Alcohol; Isotonic Sodium Chloride Solution; Jelene; Kaolin; Kathon Cg; Kathon Cg II; Lactate; Lactic Acid; Lactic Acid, Dl-; Lactic Acid, L-; Lactobionic Acid; Lactose; Lactose Monohydrate; Lactose, Hydrous; Laneth; Lanolin; Lanolin Alcohol—Mineral Oil; Lanolin Alcohols; Lanolin Anhydrous; Lanolin Cholesterols; Lanolin Nonionic Derivatives; Lanolin, Ethoxylated; Lanolin, Hydrogenated; Lauralkonium Chloride; Lauramine Oxide; Laurdimonium Hydrolyzed Animal Collagen; Laureth Sulfate; Laureth-2; Laureth-23; Laureth-4; Lauric Diethanolamide; Lauric Myristic Diethanolamide; Lauroyl Sarcosine; Lauryl Lactate; Lauryl Sulfate; Lavandula Angustifolia Flowering Top; Lecithin; Lecithin Unbleached; Lecithin, Egg; Lecithin, Hydrogenated; Lecithin, Hydrogenated Soy; Lecithin, Soybean; Lemon Oil; Leucine; Levulinic Acid; Lidofenin; Light Mineral Oil; Light Mineral Oil (85 Ssu); Limonene, (+/−)-; Lipocol Sc-15; Lysine; Lysine Acetate; Lysine Monohydrate; Magnesium Aluminum Silicate; Magnesium Aluminum Silicate Hydrate; Magnesium Chloride; Magnesium Nitrate; Magnesium Stearate; Maleic Acid; Mannitol; Maprofix; Mebrofenin; Medical Adhesive Modified 5-15; Medical Antiform A-F Emulsion; Medronate Disodium; Medronic Acid; Meglumine; Menthol; Metacresol; Metaphosphoric Acid; Methanesulfonic Acid; Methionine; Methyl Alcohol; Methyl Gluceth-10; Methyl Gluceth-20; Methyl Gluceth-20 Sesquistearate; Methyl Glucose Sesquistearate; Methyl Laurate; Methyl Pyrrolidone; Methyl Salicylate; Methyl Stearate; Methylboronic Acid; Methylcellulose (4000 Mpa·S); Methylcelluloses; Methylchloroisothiazolinone; Methylene Blue; Methylisothiazolinone; Methylparaben; Microcrystalline Wax; Mineral Oil; Mono And Diglyceride; Monostearyl Citrate; Monothioglycerol; Multisterol Extract; Myristyl Alcohol; Myristyl Lactate; Myristyl-.Gamma.-Picolinium Chloride; N-(Carbamoyl-Methoxy Peg-40)-1,2-Distearoyl-Cephalin Sodium; N,N-Dimethylacetamide; Niacinamide; Nioxime; Nitric Acid; Nitrogen; Nonoxynol Iodine; Nonoxynol-15; Nonoxynol-9; Norflurane; Oatmeal; Octadecene-1/Maleic Acid Copolymer; Octanoic Acid; Octisalate; Octoxynol-1; Octoxynol-40; Octoxynol-9; Octyldodecanol; Octylphenol Polymethylene; Oleic Acid; Oleth-10/Oleth-5; Oleth-2; Oleth-20; Oleyl Alcohol; Oleyl Oleate; Olive Oil; Oxidronate Disodium; Oxyquinoline; Palm Kernel Oil; Palmitamine Oxide; Parabens; Paraffin; Paraffin, White Soft; Parfum Creme 45/3; Peanut Oil; Peanut Oil, Refined; Pectin; Peg 6-32 Stearate/Glycol Stearate; Peg Vegetable Oil; Peg-100 Stearate; Peg-12 Glyceryl Laurate; Peg-120 Glyceryl Stearate; Peg-120 Methyl Glucose Dioleate; Peg-15 Cocamine; Peg-150 Distearate; Peg-2 Stearate; Peg-20 Sorbitan Isostearate; Peg-22 Methyl Ether/Dodecyl Glycol Copolymer; Peg-25 Propylene Glycol Stearate; Peg-4 Dilaurate; Peg-4 Laurate; Peg-40 Castor Oil; Peg-40 Sorbitan Diisostearate; Peg-45/Dodecyl Glycol Copolymer; Peg-5 Oleate; Peg-50 Stearate; Peg-54 Hydrogenated Castor Oil; Peg-6 Isostearate; Peg-60 Castor Oil; Peg-60 Hydrogenated Castor Oil; Peg-7 Methyl Ether; Peg-75 Lanolin; Peg-8 Laurate; Peg-8 Stearate; Pegoxol 7 Stearate; Pentadecalactone; Pentaerythritol Cocoate; Pentasodium Pentetate; Pentetate Calcium Trisodium; Pentetic Acid; Peppermint Oil; Perflutren; Perfume 25677; Perfume Bouquet; Perfume E-1991; Perfume Gd 5604; Perfume Tana 90/42 Scba; Perfume W-1952-1; Petrolatum; Petrolatum, White; Petroleum Distillates; Phenol; Phenol, Liquefied; Phenonip; Phenoxyethanol; Phenylalanine; Phenylethyl Alcohol; Phenylmercuric Acetate; Phenylmercuric Nitrate; Phosphatidyl Glycerol, Egg; Phospholipid; Phospholipid, Egg; Phospholipon 90g; Phosphoric Acid; Pine Needle Oil (Pinus Sylvestris); Piperazine Hexahydrate; Plastibase-50w; Polacrilin; Polidronium Chloride; Poloxamer 124; Poloxamer 181; Poloxamer 182; Poloxamer 188; Poloxamer 237; Poloxamer 407; Poly(Bis(P-Carboxyphenoxy)Propane Anhydride):Sebacic Acid; Poly(Dimethylsiloxane/Methylvinylsiloxane/Methylhydrogensiloxane) Dimethylvinyl Or Dimethylhydroxy Or Trimethyl Endblocked; Poly(Dl-Lactic-Co-Glycolic Acid), (50:50; Poly(Dl-Lactic-Co-Glycolic Acid), Ethyl Ester Terminated, (50:50; Polyacrylic Acid (250000 Mw); Polybutene (1400 Mw); Polycarbophil; Polyester; Polyester Polyamine Copolymer; Polyester Rayon; Polyethylene Glycol 1000; Polyethylene Glycol 1450; Polyethylene Glycol 1500; Polyethylene Glycol 1540; Polyethylene Glycol 200; Polyethylene Glycol 300; Polyethylene Glycol 300-1600; Polyethylene Glycol 3350; Polyethylene Glycol 400; Polyethylene Glycol 4000; Polyethylene Glycol 540; Polyethylene Glycol 600; Polyethylene Glycol 6000; Polyethylene Glycol 8000; Polyethylene Glycol 900; Polyethylene High Density Containing Ferric Oxide Black (<1%); Polyethylene Low Density Containing Barium Sulfate (20-24%); Polyethylene T; Polyethylene Terephthalates; Polyglactin; Polyglyceryl-3 Oleate; Polyglyceryl-4 Oleate; Polyhydroxyethyl Methacrylate; Polyisobutylene; Polyisobutylene (1100000 Mw); Polyisobutylene (35000 Mw); Polyisobutylene 178-236; Polyisobutylene 241-294; Polyisobutylene 35-39; Polyisobutylene Low Molecular Weight; Polyisobutylene Medium Molecular Weight; Polyisobutylene/Polybutene Adhesive; Polylactide; Polyols; Polyoxyethylene—Polyoxypropylene 1800; Polyoxyethylene Alcohols; Polyoxyethylene Fatty Acid Esters; Polyoxyethylene Propylene; Polyoxyl 20 Cetostearyl Ether; Polyoxyl 35 Castor Oil; Polyoxyl 40 Hydrogenated Castor Oil; Polyoxyl 40 Stearate; Polyoxyl 400 Stearate; Polyoxyl 6 And Polyoxyl 32 Palmitostearate; Polyoxyl Distearate; Polyoxyl Glyceryl Stearate; Polyoxyl Lanolin; Polyoxyl Palmitate; Polyoxyl Stearate; Polypropylene; Polypropylene Glycol; Polyquaternium-10; Polyquaternium-7 (70/30 Acrylamide/Dadmac; Polysiloxane; Polysorbate 20; Polysorbate 40; Polysorbate 60; Polysorbate 65; Polysorbate 80; Polyurethane; Polyvinyl Acetate; Polyvinyl Alcohol; Polyvinyl Chloride; Polyvinyl Chloride-Polyvinyl Acetate Copolymer; Polyvinylpyridine; Poppy Seed Oil; Potash; Potassium Acetate; Potassium Alum; Potassium Bicarbonate; Potassium Bisulfite; Potassium Chloride; Potassium Citrate; Potassium Hydroxide; Potassium Metabisulfite; Potassium Phosphate, Dibasic; Potassium Phosphate, Monobasic; Potassium Soap; Potassium Sorbate; Povidone Acrylate Copolymer; Povidone Hydrogel; Povidone K17; Povidone K25; Povidone K29/32; Povidone K30; Povidone K90; Povidone K90f; Povidone/Eicosene Copolymer; Povidones; Ppg-12/Smdi Copolymer; Ppg-15 Stearyl Ether; Ppg-20 Methyl Glucose Ether Distearate; Ppg-26 Oleate; Product Wat; Proline; Promulgen D; Promulgen G; Propane; Propellant A-46; Propyl Gallate; Propylene Carbonate; Propylene Glycol; Propylene Glycol Diacetate; Propylene Glycol Dicaprylate; Propylene Glycol Monolaurate; Propylene Glycol Monopalmitostearate; Propylene Glycol Palmitostearate; Propylene Glycol Ricinoleate; Propylene Glycol/Diazolidinyl Urea/Methylparaben/Propylparben; Propylparaben; Protamine Sulfate; Protein Hydrolysate; Pvm/Ma Copolymer; Quaternium-15; Quaternium-15 Cis-Form; Quaternium-52; Ra-2397; Ra-3011; Saccharin; Saccharin Sodium; Saccharin Sodium Anhydrous; Safflower Oil; Sd Alcohol 3a; Sd Alcohol 40; Sd Alcohol 40-2; Sd Alcohol 40b; Sepineo P 600; Serine; Sesame Oil; Shea Butter; Silastic Brand Medical Grade Tubing; Silastic Medical Adhesive,Silicone Type A; Silica, Dental; Silicon; Silicon Dioxide; Silicon Dioxide, Colloidal; Silicone; Silicone Adhesive 4102; Silicone Adhesive 4502; Silicone Adhesive Bio-Psa Q7-4201; Silicone Adhesive Bio-Psa Q7-4301; Silicone Emulsion; Silicone/Polyester Film Strip; Simethicone; Simethicone Emulsion; Sipon Ls 20np; Soda Ash; Sodium Acetate; Sodium Acetate Anhydrous; Sodium Alkyl Sulfate; Sodium Ascorbate; Sodium Benzoate; Sodium Bicarbonate; Sodium Bisulfate; Sodium Bisulfite; Sodium Borate; Sodium Borate Decahydrate; Sodium Carbonate; Sodium Carbonate Decahydrate; Sodium Carbonate Monohydrate; Sodium Cetostearyl Sulfate; Sodium Chlorate; Sodium Chloride; Sodium Chloride Injection; Sodium Chloride Injection, Bacteriostatic; Sodium Cholesteryl Sulfate; Sodium Citrate; Sodium Cocoyl Sarcosinate; Sodium Desoxycholate; Sodium Dithionite; Sodium Dodecylbenzenesulfonate; Sodium Formaldehyde Sulfoxylate; Sodium Gluconate; Sodium Hydroxide; Sodium Hypochlorite; Sodium Iodide; Sodium Lactate; Sodium Lactate, L-; Sodium Laureth-2 Sulfate; Sodium Laureth-3 Sulfate; Sodium Laureth-5 Sulfate; Sodium Lauroyl Sarcosinate; Sodium Lauryl Sulfate; Sodium Lauryl Sulfoacetate; Sodium Metabisulfite; Sodium Nitrate; Sodium Phosphate; Sodium Phosphate Dihydrate; Sodium Phosphate, Dibasic; Sodium Phosphate, Dibasic, Anhydrous; Sodium Phosphate, Dibasic, Dihydrate; Sodium Phosphate, Dibasic, Dodecahydrate; Sodium Phosphate, Dibasic, Heptahydrate; Sodium Phosphate, Monobasic; Sodium Phosphate, Monobasic, Anhydrous; Sodium Phosphate, Monobasic, Dihydrate; Sodium Phosphate, Monobasic, Monohydrate; Sodium Polyacrylate (2500000 Mw); Sodium Pyrophosphate; Sodium Pyrrolidone Carboxylate; Sodium Starch Glycolate; Sodium Succinate Hexahydrate; Sodium Sulfate; Sodium Sulfate Anhydrous; Sodium Sulfate Decahydrate; Sodium Sulfite; Sodium Sulfosuccinated Undecyclenic Monoalkylolamide; Sodium Tartrate; Sodium Thioglycolate; Sodium Thiomalate; Sodium Thiosulfate; Sodium Thiosulfate Anhydrous; Sodium Trimetaphosphate; Sodium Xylenesulfonate; Somay 44; Sorbic Acid; Sorbitan; Sorbitan Isostearate; Sorbitan Monolaurate; Sorbitan Monooleate; Sorbitan Monopalmitate; Sorbitan Monostearate; Sorbitan Sesquioleate; Sorbitan Trioleate; Sorbitan Tristearate; Sorbitol; Sorbitol Solution; Soybean Flour; Soybean Oil; Spearmint Oil; Spermaceti; Squalane; Stabilized Oxychloro Complex; Stannous 2-Ethylhexanoate; Stannous Chloride; Stannous Chloride Anhydrous; Stannous Fluoride; Stannous Tartrate; Starch; Starch 1500, Pregelatinized; Starch, Corn; Stearalkonium Chloride; Stearalkonium Hectorite/Propylene Carbonate; Stearamidoethyl Diethylamine; Steareth-10; Steareth-100; Steareth-2; Steareth-20; Steareth-21; Steareth-40; Stearic Acid; Stearic Diethanolamide; Stearoxytrimethylsilane; Steartrimonium Hydrolyzed Animal Collagen; Stearyl Alcohol; Sterile Water For Inhalation; Styrene/Isoprene/Styrene Block Copolymer; Succimer; Succinic Acid; Sucralose; Sucrose; Sucrose Distearate; Sucrose Polyesters; Sulfacetamide Sodium; Sulfobutylether .Beta.-Cyclodextrin; Sulfur Dioxide; Sulfuric Acid; Sulfurous Acid; Surfactol Qs; Tagatose, D-; Talc; Tall Oil; Tallow Glycerides; Tartaric Acid; Tartaric Acid, Dl-; Tenox; Tenox-2; Tert-Butyl Alcohol; Tert-Butyl Hydroperoxide; Tert-Butylhydroquinone; Tetrakis(2-Methoxyisobutylisocyanide)Copper(I) Tetrafluoroborate; Tetrapropyl Orthosilicate; Tetrofosmin; Theophylline; Thimerosal; Threonine; Thymol; Tin; Titanium Dioxide; Tocopherol; Tocophersolan; Total parenteral nutrition, lipid emulsion; Triacetin; Tricaprylin; Trichloromonofluoromethane; Trideceth-10; Triethanolamine Lauryl Sulfate; Trifluoroacetic Acid; Triglycerides, Medium Chain; Trihydroxystearin; Trilaneth-4 Phosphate; Trilaureth-4 Phosphate; Trisodium Citrate Dihydrate; Trisodium Hedta; Triton 720; Triton X-200; Trolamine; Tromantadine; Tromethamine (TRIS); Tryptophan; Tyloxapol; Tyrosine; Undecylenic Acid; Union 76 Amsco-Res 6038; Urea; Valine; Vegetable Oil; Vegetable Oil Glyceride, Hydrogenated; Vegetable Oil, Hydrogenated; Versetamide; Viscarin; Viscose/Cotton; Vitamin E; Wax, Emulsifying; Wecobee Fs; White Ceresin Wax; White Wax; Xanthan Gum; Zinc; Zinc Acetate; Zinc Carbonate; Zinc Chloride; and Zinc Oxide.

[0496] Pharmaceutical composition formulations of viral particles (e.g., AAV particles or regulatable-AAV particles) disclosed herein may include cations or anions. In one embodiment, the formulations include metal cations such as, but not limited to, Zn2+, Ca2+, Cu2+, Mn2+, Mg+ and combinations thereof. As a non-limiting example, formulations may include polymers and complexes with a metal cation (See e.g., U.S. Pat. Nos. 6,265,389 and 6,555,525, each of which is herein incorporated by reference in its entirety).

[0497] Formulations of the invention may also include one or more pharmaceutically acceptable salts. As used herein, “pharmaceutically acceptable salts” refers to derivatives of the disclosed compounds wherein the parent compound is modified by converting an existing acid or base moiety to its salt form (e.g., by reacting the free base group with a suitable organic acid). Examples of pharmaceutically acceptable salts include, but are not limited to, mineral or organic acid salts of basic residues such as amines; alkali or organic salts of acidic residues such as carboxylic acids; and the like. Representative acid addition salts include acetate, acetic acid, adipate, alginate, ascorbate, aspartate, benzenesulfonate, benzene sulfonic acid, benzoate, bisulfate, borate, butyrate, camphorate, camphorsulfonate, citrate, cyclopentanepropionate, digluconate, dodecylsulfate, ethanesulfonate, fumarate, glucoheptonate, glycerophosphate, hemisulfate, heptonate, hexanoate, hydrobromide, hydrochloride, hydroiodide, 2-hydroxy-ethanesulfonate, lactobionate, lactate, laurate, lauryl sulfate, malate, maleate, malonate, methanesulfonate, 2-naphthalenesulfonate, nicotinate, nitrate, oleate, oxalate, palmitate, pamoate, pectinate, persulfate, 3-phenylpropionate, phosphate, picrate, pivalate, propionate, stearate, succinate, sulfate, tartrate, thiocyanate, toluenesulfonate, undecanoate, valerate salts, and the like. Representative alkali or alkaline earth metal salts include sodium, lithium, potassium, calcium, magnesium, and the like, as well as nontoxic ammonium, quaternary ammonium, and amine cations, including, but not limited to ammonium, tetramethylammonium, tetraethylammonium, methylamine, dimethylamine, trimethylamine, triethylamine, ethylamine, and the like. The pharmaceutically acceptable salts of the present disclosure include the conventional non-toxic salts of the parent compound formed, for example, from non-toxic inorganic or organic acids.

[0498] Solvates may be prepared by crystallization, recrystallization, or precipitation from a solution that includes organic solvents, water, or a mixture thereof. Examples of suitable solvents are ethanol, water (for example, mono-, di-, and tri-hydrates), N-methylpyrrolidinone (NMP), dimethyl sulfoxide (DMSO), N,N′-dimethylformamide (DMF), N,N′-dimethylacetamide (DMAC), 1,3-dimethyl-2-imidazolidinone (DMEU), 1,3-dimethyl-3,4,5,6-tetrahydro-2-(1H)-pyrimidinone (DMPU), acetonitrile (ACN), propylene glycol, ethyl acetate, benzyl alcohol, 2-pyrrolidone, benzyl benzoate, and the like. When water is the solvent, the solvate is referred to as a “hydrate.”

### Administration

[0499] In one embodiment, the viral particles (e.g., AAV particles and regulatable-AAV particles) may be administered by any route which results in a therapeutically effective outcome. These include, but are not limited to enteral (into the intestine), gastroenteral, epidural (into the dura mater), oral (by way of the mouth), transdermal, peridural, intracerebral (into the cerebrum), intracerebroventricular (into the cerebral ventricles), epicutaneous (application onto the skin), intradermal, (into the skin itself), subcutaneous (under the skin), nasal administration (through the nose), intravenous (into a vein), intravenous bolus, intravenous drip, intraarterial (into an artery), intramuscular (into a muscle), intracardiac (into the heart), intraosseous infusion (into the bone marrow), intrathecal (into the spinal canal), intraperitoneal, (infusion or injection into the peritoneum), intravesical infusion, intravitreal, (through the eye), intracavernous injection (into a pathologic cavity) intracavitary (into the base of the penis), intravaginal administration, intrauterine, extra-amniotic administration, transdermal (diffusion through the intact skin for systemic distribution), transmucosal (diffusion through a mucous membrane), transvaginal, insufflation (snorting), sublingual, sublabial, enema, eye drops (onto the conjunctiva), in ear drops, auricular (in or by way of the ear), buccal (directed toward the cheek), conjunctival, cutaneous, dental (to a tooth or teeth), electro-osmosis, endocervical, endosinusial, endotracheal, extracorporeal, hemodialysis, infiltration, interstitial, intra-abdominal, intra-amniotic, intra-articular, intrabiliary, intrabronchial, intrabursal, intracartilaginous (within a cartilage), intracaudal (within the cauda equine), intracisternal (within the cisterna magna cerebellomedularis), intracorneal (within the cornea), dental intracornal, intracoronary (within the coronary arteries), intracorporus cavernosum (within the dilatable spaces of the corporus cavernosa of the penis), intradiscal (within a disc), intraductal (within a duct of a gland), intraduodenal (within the duodenum), intradural (within or beneath the dura), intraepidermal (to the epidermis), intraesophageal (to the esophagus), intragastric (within the stomach), intragingival (within the gingivae), intraileal (within the distal portion of the small intestine), intralesional (within or introduced directly to a localized lesion), intraluminal (within a lumen of a tube), intralymphatic (within the lymph), intramedullary (within the marrow cavity of a bone), intrameningeal (within the meninges), intraocular (within the eye), intraovarian (within the ovary), intrapericardial (within the pericardium), intrapleural (within the pleura), intraprostatic (within the prostate gland), intrapulmonary (within the lungs or its bronchi), intrasinal (within the nasal or periorbital sinuses), intraspinal (within the vertebral column), intrasynovial (within the synovial cavity of a joint), intratendinous (within a tendon), intratesticular (within the testicle), intrathecal (within the cerebrospinal fluid at any level of the cerebrospinal axis), intrathoracic (within the thorax), intratubular (within the tubules of an organ), intratumor (within a tumor), intratympanic (within the aurus media), intravascular (within a vessel or vessels), intraventricular (within a ventricle), iontophoresis (by means of electric current where ions of soluble salts migrate into the tissues of the body), irrigation (to bathe or flush open wounds or body cavities), laryngeal (directly upon the larynx), nasogastric (through the nose and into the stomach), occlusive dressing technique (topical route administration which is then covered by a dressing which occludes the area), ophthalmic (to the external eye), oropharyngeal (directly to the mouth and pharynx), parenteral, percutaneous, periarticular, peridural, perineural, periodontal, rectal, respiratory (within the respiratory tract by inhaling orally or nasally for local or systemic effect), retrobulbar (behind the pons or behind the eyeball), soft tissue, subarachnoid, subconjunctival, submucosal, topical, transplacental (through or across the placenta), transtracheal (through the wall of the trachea), transtympanic (across or through the tympanic cavity), ureteral (to the ureter), urethral (to the urethra), vaginal, caudal block, diagnostic, nerve block, biliary perfusion, cardiac perfusion, photopheresis or spinal. In specific embodiments, compositions may be administered in a way which allows them cross the blood-brain barrier, vascular barrier, or other epithelial barrier.

[0500] In one embodiment, a formulation for a route of administration may include at least one inactive ingredient.

[0501] In some embodiments, compositions may be administered in a way which allows them to cross the blood-brain barrier, vascular barrier, or other epithelial barrier. The viral particles (e.g., AAV particles or regulatable-AAV particles) of the present invention may be administered in any suitable form, either as a liquid solution or suspension, as a solid form suitable for liquid solution or suspension in a liquid solution. The viral particles (e.g., AAV particles or regulatable-AAV particles) may be formulated with any appropriate and pharmaceutically acceptable excipient.

[0502] In one embodiment, the viral particles (e.g., AAV particles or regulatable-AAV particles) of the present invention may be delivered to a subject via a single route administration.

[0503] In one embodiment, the viral particles (e.g., AAV particles or regulatable-AAV particles) of the present invention may be delivered to a subject via a multi-site route of administration. A subject may be administered at 2, 3, 4, 5 or more than 5 sites.

[0504] In one embodiment, a subject may be administered the viral particles (e.g., AAV particles or regulatable-AAV particles) of the present invention using a bolus infusion.

[0505] In one embodiment, a subject may be administered the viral particles (e.g., AAV particles or regulatable-AAV particles) of the present invention using sustained delivery over a period of minutes, hours or days. The infusion rate may be changed depending on the subject, distribution, formulation or another delivery parameter.

[0506] In one embodiment, the viral particles (e.g., AAV particles or regulatable-AAV particles) of the present invention may be delivered by intramuscular delivery route. (See, e.g., U.S. Pat. No. 6,506,379; the content of which is incorporated herein by reference in its entirety). Non-limiting examples of intramuscular administration include an intravenous injection or a subcutaneous injection.

[0507] In one embodiment, the viral particles (e.g., AAV particles or regulatable-AAV particles) of the present invention may be delivered by oral administration. Non-limiting examples of oral administration include a digestive tract administration and a buccal administration.

[0508] In one embodiment, the viral particles (e.g., AAV particles or regulatable-AAV particles) of the present invention may be delivered by intraocular delivery route. A non-limiting example of intraocular administration include an intravitreal injection.

[0509] In one embodiment, the viral particles (e.g., AAV particles or regulatable-AAV particles) of the present invention may be delivered by intranasal delivery route. Non-limiting examples of intranasal delivery include administration of nasal drops or nasal sprays.

[0510] In some embodiments, the viral particles (e.g., AAV particles or regulatable-AAV particles) that may be administered to a subject by peripheral injections. Non-limiting examples of peripheral injections include intraperitoneal, intramuscular, intravenous, conjunctival or joint injection. It was disclosed in the art that the peripheral administration of AAV vectors can be transported to the central nervous system, for example, to the motor neurons (e.g., U. S. Patent Publication Nos. 20100240739; and 20100130594; the content of each of which is incorporated herein by reference in their entirety).

[0511] In one embodiment, the viral particles (e.g., AAV particles or regulatable-AAV particles) may be delivered by injection into the CSF pathway. Non-limiting examples of delivery to the CSF pathway include intrathecal and intracerebroventricular administration.

[0512] In one embodiment, the viral particles (e.g., AAV particles or regulatable-AAV particles) may be delivered by systemic delivery. As a non-limiting example, the systemic delivery may be by intravascular administration.

[0513] In one embodiment, the viral particles (e.g., AAV particles or regulatable-AAV particles) of the present invention may be administered to a subject by intracranial delivery (See, e.g., U.S. Pat. No. 8,119,611; the content of which is incorporated herein by reference in its entirety).

[0514] In one embodiment, the viral particles (e.g., AAV particles or regulatable-AAV particles) of the present invention may be administered to a subject by intraparenchymal administration.

[0515] In one embodiment, the viral particles (e.g., AAV particles or regulatable-AAV particles) of the present invention may be administered to a subject by intramuscular administration.

[0516] In one embodiment, the viral particles (e.g., AAV particles or regulatable-AAV particles) of the present invention are administered to a subject and transduce muscle of a subject. As a non-limiting example, the viral particles (e.g., AAV particles or regulatable-AAV particles) are administered by intramuscular administration.

[0517] In one embodiment, the viral particles (e.g., AAV particles or regulatable-AAV particles) of the present invention may be administered to a subject by intravenous administration.

[0518] In one embodiment, the viral particles (e.g., AAV particles or regulatable-AAV particles) of the present invention may be administered to a subject by subcutaneous administration.

[0519] In one embodiment, the viral particles (e.g., AAV particles or regulatable-AAV particles) of the present invention may be administered to a subject by topical administration.

[0520] In one embodiment, the viral particles (e.g., AAV particles or regulatable-AAV particles) may be delivered by direct injection into the brain. As a non-limiting example, the brain delivery may be by intrastriatal administration.

[0521] In one embodiment, the viral particles (e.g., AAV particles or regulatable-AAV particles) may be delivered by more than one route of administration. As non-limiting examples of combination administrations, viral particles (e.g., AAV particles or regulatable-AAV particles) may be delivered by intrathecal and intracerebroventricular, or by intravenous and intraparenchymal administration.

[0522] In one embodiment, the viral particles (e.g., AAV particles or regulatable-AAV particles) comprising the various payload constructs may be administered simultaneously. In another embodiment, the viral particles (e.g., AAV particles or regulatable-AAV particles) may be administered sequentially. In some embodiments, the regulatable-AAV particles comprising the regulatable element may be delivered, 1, 2, 3, 4, 5, 6, or 7 days before or after the viral particles (e.g., AAV particles) comprising the payload encoding the gene of interest. In some embodiments, the regulatable-AAV particles comprising the regulatable element may be delivered, 1 to 4 weeks before or after the viral particles (e.g., AAV particles) comprising the payload encoding the gene of interest. In some embodiments, the regulatable-AAV particles comprising the regulatable element may be delivered, 1 month to 1 year before or after the viral particles (e.g., AAV particles) comprising the payload encoding the gene of interest. In some embodiments, the regulatable-AAV particles comprising the regulatable element may be delivered, 1 year to up to 5, 10, 20, 30, 40, 50, 60, or 70 years before or after the viral particles (e.g., AAV particles) comprising the payload encoding the gene of interest.

[0523] In some embodiments, multiple types of delivery methods may be used in combination to deliver different payload components. In one embodiment, a viral particle (e.g., AAV particle or regulatable-AAV particle) comprising the payload comprising the gene of interest is delivered in combination (simultaneously or sequentially) with one or more regulatable elements, which are delivered via a non-AAV vehicle or method. In another embodiment, the payload may be delivered using a non-AAV delivery vehicle or method and the one or more regulatable elements may be delivered as payloads contained in one or more regulatable-AAV particles. In one embodiment, a regulatable element may be delivered by a viral particle (e.g., AAV vector or regulatable-AAV vector). In one embodiment, the regulatable element may be delivered as an mRNA or formulated mRNA. In another embodiment, the payload may be delivered as an mRNA or formulated mRNA. In one embodiment, the regulatable element may be delivered as a protein or a formulated protein. In another embodiment, the payload may be delivered as a protein or a formulated protein.

### Combinations

[0524] In one embodiment, the viral particles may be used in combination with one or more other therapeutic, prophylactic, diagnostic, or imaging agents. By “in combination with,” it is not intended to imply that the agents must be administered at the same time and/or formulated for delivery together, although these methods of delivery are within the scope of the present disclosure. Compositions can be administered concurrently with, prior to, or subsequent to, one or more other desired therapeutics or medical procedures. In general, each agent will be administered at a dose and/or on a time schedule determined for that agent. In some embodiments, the present disclosure encompasses the delivery of pharmaceutical, prophylactic, diagnostic, or imaging compositions in combination with agents that may improve their bioavailability, reduce and/or modify their metabolism, inhibit their excretion, and/or modify their distribution within the body.

### Delivery to Cells

[0525] The present disclosure provides a method of delivering to a cell or tissue any of the viral particles, comprising contacting the cell or tissue with the viral particles or contacting the cell or tissue with a particle comprising the viral particles, or contacting the cell or tissue with any of the described compositions, including pharmaceutical compositions. The method of delivering the viral particles to a cell or tissue can be accomplished in vitro, ex vivo, or in vivo.

[0526] In one embodiment, the viral particles of the present invention may be administered to stem cells. The present disclosure provides a method of delivering to a stem cell any of the viral particles, comprising contacting the stem cell with the viral particles or contacting the stem cell with a particle comprising the viral particles, or contacting the stem cell with any of the described compositions, including pharmaceutical compositions.

[0527] In one embodiment, the viral particle may be an AAV particle which is delivered to a stem cell and may comprise an AAV Clade F capsid.

[0528] In one embodiment, the viral particle administered to cells comprises a correction genome as described in International Publication WO2016049230, the contents of which are herein incorporated by reference in their entirety. The correction genome comprises three elements, an internucleotide bond or nucleotide sequence for integration into a target locus of a mammalian chromosome, which serves as the editing element, and a 5′ and a 3′ homologous arm sequence at the 5′ and 3′ ends of the editing element respectively, which have homology to the 5′ region and the 3′ region of the mammalian chromosome relative to the target locus. Further, the correction genome may be characterized by the absence of a promoter operatively linked to the editing element nucleotide sequence. In some embodiments, the viral particle comprising a correction genome may be introduced to a stem cell (e.g., CD34+). In some embodiments, the cell may be transduced without exogenous nucleases. Genome editing by the correction genome (insertions, deletions, point mutations, alterations or any combination thereof) may be conducted ex vivo or in vivo in a subject in need thereof and may be used to treat a disease or disorder.

### Delivery to Subjects

[0529] The present disclosure additionally provides a method of delivering to a subject, including a mammalian subject, any of the above-described viral particles comprising administering to the subject the viral particles, or administering to the subject a viral particles, or administering to the subject any of the described compositions, including pharmaceutical compositions.

### Dosing

[0530] The present invention provides methods of administering viral particles (e.g., AAV particles or regulatable-AAV particles) and their payload or complexes in accordance with the invention to a subject in need thereof. Viral particle pharmaceutical, imaging, diagnostic, or prophylactic compositions thereof, may be administered to a subject using any amount and any route of administration effective for preventing, treating, diagnosing, or imaging a disease, disorder, and/or condition (e.g., a disease, disorder, and/or condition relating to working memory deficits). The exact amount required will vary from subject to subject, depending on the species, age, and general condition of the subject, the severity of the disease, the particular composition, its mode of administration, its mode of activity, and the like. Compositions in accordance with the invention are typically formulated in unit dosage form for ease of administration and uniformity of dosage. It will be understood, however, that the total daily usage of the compositions of the present invention may be decided by the attending physician within the scope of sound medical judgment. The specific therapeutically effective, prophylactically effective, or appropriate imaging dose level for any particular patient will depend upon a variety of factors including the disorder being treated and the severity of the disorder; the activity of the specific payload employed; the specific composition employed; the age, body weight, general health, sex and diet of the patient; the time of administration, route of administration, and rate of excretion of the specific payload employed; the duration of the treatment; drugs used in combination or coincidental with the specific payload employed; and like factors well known in the medical arts.

[0531] In certain embodiments, viral particle pharmaceutical compositions in accordance with the present invention may be administered at dosage levels sufficient to deliver from about 0.0001 mg/kg to about 100 mg/kg, from about 0.001 mg/kg to about 0.05 mg/kg, from about 0.005 mg/kg to about 0.05 mg/kg, from about 0.001 mg/kg to about 0.005 mg/kg, from about 0.05 mg/kg to about 0.5 mg/kg, from about 0.01 mg/kg to about 50 mg/kg, from about 0.1 mg/kg to about 40 mg/kg, from about 0.5 mg/kg to about 30 mg/kg, from about 0.01 mg/kg to about 10 mg/kg, from about 0.1 mg/kg to about 10 mg/kg, or from about 1 mg/kg to about 25 mg/kg, of subject body weight per day, one or more times a day, to obtain the desired therapeutic, diagnostic, prophylactic, or imaging effect. It will be understood that the above dosing concentrations may be converted to vg or viral genomes per kg or into total viral genomes administered by one of skill in the art.

[0532] In certain embodiments, viral particle pharmaceutical compositions in accordance with the present disclosure may be administered at about 10 to about 600 μl/site, 50 to about 500 μl/site, 100 to about 400 μl/site, 120 to about 300 μl/site, 140 to about 200 μl/site, about 160 μl/site. As non-limiting examples, viral particles may be administered at 50 μl/site and/or 150 μl/site.

[0533] The desired dosage may be delivered three times a day, two times a day, once a day, every other day, every third day, every week, every two weeks, every three weeks, or every four weeks. In certain embodiments, the desired dosage may be delivered using multiple administrations (e.g., two, three, four, five, six, seven, eight, nine, ten, eleven, twelve, thirteen, fourteen, or more administrations). When multiple administrations are employed, split dosing regimens such as those described herein may be used. As used herein, a “split dose” is the division of single unit dose or total daily dose into two or more doses, e.g., two or more administrations of the single unit dose. As used herein, a “single unit dose” is a dose of any therapeutic administered in one dose/at one time/single route/single point of contact, i.e., single administration event. As used herein, a “total daily dose” is an amount given or prescribed in 24 hour period. It may be administered as a single unit dose. In one embodiment, the viral particles of the present invention are administered to a subject in split doses. The viral particles may be formulated in buffer only or in a formulation described herein.

[0534] A pharmaceutical composition described herein can be formulated into a dosage form described herein, such as a topical, intranasal, pulmonary, intratracheal, or injectable (e.g., intravenous, intraocular, intravitreal, intramuscular, intracardiac, intraperitoneal, and/or subcutaneous).

[0535] In one embodiment, delivery of the viral particles of the present invention to a subject provides neutralizing activity to a subject. The neutralizing activity can be for at least 1 month, 2 months, 3 months, 4 months, 5 months, 6 months, 7 months, 8 months, 9 months, 10 months, 11 months, 1 year, 13 months, 14 months, 15 months, 16 months, 17 months, 18 months, 19 months, 20 months, 20 months, 21 months, 22 months, 23 months, 2 years, 3 years, 4 years, 5 years, 6 years, 7 years, 8 years, 9 years, 10 years or more than 10 years.

[0536] In one embodiment, delivery of the viral particles of the present invention results in minimal serious adverse events (SAEs) as a result of the delivery of the viral particles.

[0537] In one embodiment, delivery of viral particles to cells of the central nervous system (e.g., parenchyma) may comprise a total dose between about 1×10⁶ VG and about 1×10¹⁶ VG. In some embodiments, delivery may comprise a total dose of about 1×10⁶, 2×10⁶, 3×10⁶, 4×10⁶, 5×10⁶, 6×10⁶, 7×10⁶, 8×10⁶, 9×10⁶, 1×10⁷, 2×10⁷, 3×10⁷, 4×10⁷, 5×10⁷, 6×10⁷, 7×10⁷, 8×10⁷, 9×10⁷, 1×10⁸, 2×10⁸, 3×10⁸, 4×10⁸, 5×10⁸, 6×10⁸, 7×10⁸, 8×10⁸, 9×10⁸, 1×10⁹, 2×10⁹, 3×10⁹, 4×10⁹, 5×10⁹, 6×10⁹, 7×10⁹, 8×10⁹, 9×10⁹, 1×10¹⁰, 1.9×10¹⁰, 2×10¹⁰, 3×10¹⁰, 3.73×10¹⁰, 4×10¹⁰, 5×10¹⁰, 6×10¹⁰, 7×10¹⁰, 8×10¹⁰, 9×10¹⁰, 1×10¹¹, 2×10¹¹, 2.5×10¹¹, 3×10¹¹, 4×10¹¹, 5×10¹¹, 6×10¹¹, 7×10¹¹, 8×10¹¹, 9×10¹¹, 1×10¹², 2×10¹², 3×10¹², 4×10¹², 5×10¹², 6×10¹², 7×10¹², 8×10¹², 9×10¹², 1×10¹³, 2×10¹³, 3×10¹³, 4×10¹³, 5×10¹³, 6×10¹³, 7×10¹³, 8×10¹³, 9×10¹³, 1×10¹⁴, 2×10¹⁴, 3×10¹⁴, 4×10¹⁴, 5×10¹⁴, 6×10¹⁴, 7×10¹⁴, 8×10¹⁴, 9×10¹⁴, 1×10¹⁵, 2×10¹⁵, 3×10¹⁵, 4×10¹⁵, 5×10¹⁵, 6×10¹⁵, 7×10¹⁵, 8×10¹⁵, 9×10¹⁵, or 1×10¹⁶ VG. As a non-limiting example, the total dose is 1×10¹³VG. As another non-limiting example, the total dose is 2.1×10¹² VG.

[0538] In one embodiment, delivery of viral particles to cells of the central nervous system may comprise a composition concentration between about 1×10⁶ VG/mL and about 1×10¹⁶VG/mL. In some embodiments, delivery may comprise a composition concentration of about 1×10⁶, 2×10⁶, 3×10⁶, 4×10⁶, 5×10⁶, 6×10⁶, 7×10⁶, 8×10⁶, 9×10⁶, 1×10⁷, 2×10⁷, 3×10⁷, 4×10⁷, 5×10⁷, 6×10⁷, 7×10⁷, 8×10⁷, 9×10⁷, 1×10⁸, 2×10⁸, 3×10⁸, 4×10⁸, 5×10⁸, 6×10⁸, 7×10⁸, 8×10⁸, 9×10⁸, 1×10⁹, 2×10⁹, 3×10⁹, 4×10⁹, 5×10⁹, 6×10⁹, 7×10⁹, 8×10⁹, 9×10⁹, 1×10¹⁰, 2×10¹⁰, 3×10¹⁰, 4×10¹⁰, 5×10¹⁰, 6×10¹⁰, 7×10¹⁰, 8×10¹⁰, 9×10¹⁰ 1×10¹¹, 2×10¹¹, 3×10¹¹, 4×10¹¹, 5×10¹¹, 6×10¹¹, 7×10¹¹, 8×10¹¹, 9×10¹¹, 1×10¹², 2×10¹² 3×10¹², 4×10¹², 5×10¹², 6×10¹², 7×10¹², 8×10¹², 9×10¹², 1×10¹³, 2×10¹³, 3×10¹³, 4×10¹³ 5×10¹³, 6×10¹³, 7×10¹³, 8×10¹³, 9×10¹³, 1×10¹⁴, 2×10¹⁴, 3×10¹⁴, 4×10¹⁴, 5×10¹⁴, 6×10¹⁴ 7×10¹⁴, 8×10¹⁴, 9×10¹⁴, 1×10¹⁵, 2×10¹⁵, 3×10¹⁵, 4×10¹⁵, 5×10¹⁵, 6×10¹⁵, 7×10¹⁵, 8×10¹⁵ 9×10¹⁵, or 1×10¹⁶ VG/mL. In one embodiment, the delivery comprises a composition concentration of 1×10¹³ VG/mL. In one embodiment, the delivery comprises a composition concentration of 2.1×10¹² VG/mL.

### Measurement of Expression

[0539] Expression of payloads from viral genomes may be determined using various methods known in the art such as, but not limited to immunochemistry (e.g., IHC), in situ hybridization (ISH), enzyme-linked immunosorbent assay (ELISA), affinity ELISA, ELISPOT, flow cytometry, immunocytology, surface plasmon resonance analysis, kinetic exclusion assay, liquid chromatography-mass spectrometry (LCMS), high-performance liquid chromatography (HPLC), BCA assay, immunoelectrophoresis, Western blot, SDS-PAGE, protein immunoprecipitation, and/or PCR.

### Bioavailability

[0540] The viral particles, when formulated into a composition with a delivery agent as described herein, can exhibit an increase in bioavailability as compared to a composition lacking a delivery agent as described herein. As used herein, the term “bioavailability” refers to the systemic availability of a given amount of viral particle or expressed payload administered to a mammal. Bioavailability can be assessed by measuring the area under the curve (AUC) or the maximum serum or plasma concentration (Cₘₐₓ) of the composition following. AUC is a determination of the area under the curve plotting the serum or plasma concentration of a compound (e.g., viral particles or expressed payloads) along the ordinate (Y-axis) against time along the abscissa (X-axis). Generally, the AUC for a particular compound can be calculated using methods known to those of ordinary skill in the art and as described in G. S. Banker, Modern Pharmaceutics, Drugs and the Pharmaceutical Sciences, v. 72, Marcel Dekker, New York, Inc., 1996, the contents of which are herein incorporated by reference in its entirety.

[0541] The Cₘₐₓ value is the maximum concentration of the viral particle or expressed payload achieved in the serum or plasma of a mammal following administration of the viral particle to the mammal. The Cₘₐₓ value of can be measured using methods known to those of ordinary skill in the art. The phrases “increasing bioavailability” or “improving the pharmacokinetics,” as used herein mean that the systemic availability of a first viral particle or expressed payload, measured as AUC, Cₘₐₓ, or Cₘᵢₙ in a mammal is greater, when co-administered with a delivery agent as described herein, than when such co-administration does not take place. In some embodiments, the bioavailability can increase by at least about 2%, at least about 5%, at least about 10%, at least about 15%, at least about 20%, at least about 25%, at least about 30%, at least about 35%, at least about 40%, at least about 45%, at least about 50%, at least about 55%, at least about 60%, at least about 65%, at least about 70%, at least about 75%, at least about 80%, at least about 85%, at least about 90%, at least about 95%, or about 100%.

### Therapeutic Window

[0542] As used herein “therapeutic window” refers to the range of plasma concentrations, or the range of levels of therapeutically active substance at the site of action, with a high probability of eliciting a therapeutic effect. In some embodiments, the therapeutic window of the viral particle as described herein can increase by at least about 2%, at least about 5%, at least about 10%, at least about 15%, at least about 20%, at least about 25%, at least about 30%, at least about 35%, at least about 40%, at least about 45%, at least about 50%, at least about 55%, at least about 60%, at least about 65%, at least about 70%, at least about 75%, at least about 80%, at least about 85%, at least about 90%, at least about 95%, or about 100%.

### Volume of Distribution

[0543] As used herein, the term “volume of distribution” refers to the fluid volume that would be required to contain the total amount of the drug in the body at the same concentration as in the blood or plasma: V_{dist} equals the amount of drug in the body/concentration of drug in blood or plasma. For example, for a 10 mg dose and a plasma concentration of 10 mg/L, the volume of distribution would be 1 liter. The volume of distribution reflects the extent to which the drug is present in the extravascular tissue. A large volume of distribution reflects the tendency of a compound to bind to the tissue components compared with plasma protein binding. In a clinical setting, V_{dist} can be used to determine a loading dose to achieve a steady state concentration. In some embodiments, the volume of distribution of the viral particles as described herein can decrease at least about 2%, at least about 5%, at least about 10%, at least about 15%, at least about 20%, at least about 25%, at least about 30%, at least about 35%, at least about 40%, at least about 45%, at least about 50%, at least about 55%, at least about 60%, at least about 65%, at least about 70%.

### Biological Effect

[0544] In one embodiment, the biological effect of the viral particles delivered to the animals may be categorized by analyzing the payload expression in the animals. The payload expression may be determined from analyzing a biological sample collected from a mammal administered the viral particles of the present invention. For example, a protein expression of 50-200 pg/ml for the protein encoded by the viral particles delivered to the mammal may be seen as a therapeutically effective amount of protein in the mammal.

### Methods of Use

[0545] The present disclosure additionally provides a method for treating a disease, disorder and/or condition in a mammalian subject, including a human subject, comprising administering to the subject any of viral genomes (“VG”) or administering to the subject a viral particle comprising a viral genome, or administering to the subject any of the described compositions, including pharmaceutical compositions.

[0546] In some embodiments, the present invention provides methods for inhibiting, silencing or inducing, activating, and/or initiating expression of a gene in a cell.

[0547] In one embodiment, the disease, disorder and/or condition is a neurological disease, disorder and/or condition.

[0548] In one embodiment, the neurological disease, disorder and/or condition is Parkinson's disease.

[0549] In one embodiment, the neurological disease, disorder and/or condition is Friedreich's Ataxia.

[0550] In one embodiment, the neurological disease, disorder and/or condition is Amyotrophic lateral sclerosis (ALS).

[0551] In one embodiment, the neurological disease, disorder and/or condition is Huntington's disease.

[0552] In one embodiment, the neurological disease, disorder and/or condition is spinal muscular atrophy (SMA).

[0553] In one embodiment, the neurological disease, disorder and/or condition is a muscular or cardiac disease, disorder and/or condition.

[0554] In one embodiment, the neurological disease, disorder and/or condition is an immune system disease, disorder and/or condition.

[0555] In one embodiment, the neurological disease, disorder and/or condition is a disease, disorder and/or condition of the CNS.

[0556] In one embodiment, neurological disease, disorder and/or condition is Alzheimer's Disease.

[0557] The polynucleotides encoding polypeptides (e.g., mRNA) of the invention may be useful in the fields of human disease, antibodies, viruses, veterinary applications and a variety of in vivo and in vitro settings.

[0558] In some embodiments, the viral particles are useful in the field of medicine for the treatment, palliation or amelioration of conditions or diseases such as, but not limited to, blood, cardiovascular, CNS, dermatology, endocrinology, genetic, genitourinary, gastrointestinal, musculoskeletal, oncology, and immunology, respiratory, sensory and anti-infective.

[0559] In one embodiment, the viral particles are useful in the treatment of Duchenne muscular dystrophy or Becker muscular dystrophy.

[0560] In some embodiments, viral particles in accordance with the present invention may be used for the treatment of disorders, and/or conditions, including but not limited to one or more of the following: autoimmune disorders (e.g. diabetes, lupus, multiple sclerosis, psoriasis, rheumatoid arthritis); inflammatory disorders (e.g. arthritis, pelvic inflammatory disease); neurological disorders (e.g. Alzheimer's disease, Huntington's disease; autism; Parkinson's disease, amyotrophic lateral sclerosis, Friedrich's Ataxia, spinal muscular atrophy, schizophrenia); cardiovascular disorders (e.g. atherosclerosis, hypercholesterolemia, thrombosis, clotting disorders, angiogenic disorders such as macular degeneration; proliferative disorders (e.g. cancer, benign neoplasms); respiratory disorders (e.g. chronic obstructive pulmonary disease); digestive disorders (e.g. inflammatory bowel disease, ulcers); musculoskeletal disorders (e.g. fibromyalgia, arthritis, Duchenne muscular dystrophy, Becker muscular dystrophy); endocrine, metabolic, and nutritional disorders (e.g. diabetes, osteoporosis); urological disorders (e.g. renal disease); psychological disorders (e.g. depression, schizophrenia); skin disorders (e.g. wounds, eczema); blood and lymphatic disorders (e.g. anemia, hemophilia).

### Definitions

[0561] At various places in the present specification, substituents of compounds of the present disclosure are disclosed in groups or in ranges. It is specifically intended that the present disclosure include each and every individual sub-combination of the members of such groups and ranges. The following is a non-limiting list of term definitions.

[0562] Adeno-associated virus: The term “adeno-associated virus” or “AAV” as used herein refers to members of the dependovirus genus comprising any particle, sequence, gene, protein, or component derived therefrom.

[0563] Adeno-associated virus particle or AAV particle: As used herein, the term “adeno-associated virus particle” or “AAV particle” refers to a viral particle where the virus is adeno-associated virus (AAV). The AAV particle may be derived from any serotype, described herein or known in the art, including combinations of serotypes (i.e., “pseudotyped” AAV) or from various genomes (e.g., single stranded or self-complementary). In addition, the AAV particle may be replication defective and/or targeted.

[0564] Activity: As used herein, the term “activity” refers to the condition in which things are happening or being done. Compositions of the invention may have activity and this activity may involve one or more biological events.

[0565] Administered in combination: As used herein, the term “administered in combination” or “combined administration” refers to simultaneous exposure to two or more agents administered at the same time or within an interval such that the subject is at some point in time simultaneously exposed to both and/or such that there may be an overlap in the effect of each agent on the patient. In some embodiments, at least one dose of one or more agents is administered within about 24 hours, 12 hours, 6 hours, 3 hours, 1 hour, 30 minutes, 15 minutes, 10 minutes, 5 minutes, or 1 minute of at least one dose of one or more other agents. In some embodiments, administration occurs in overlapping dosage regimens. As used herein, the term “dosage regimen” refers to a plurality of doses spaced apart in time. Such doses may occur at regular intervals or may include one or more hiatus in administration. In some embodiments, the administration of individual doses of one or more compounds and/or compositions of the present invention, as described herein, are spaced sufficiently closely together such that a combinatorial (e.g., a synergistic) effect is achieved.

[0566] Amelioration: As used herein, the term “amelioration” or “ameliorating” refers to a lessening of severity of at least one indicator of a condition or disease. For example, in the context of neurodegeneration disorder, amelioration includes the reduction of neuron loss.

[0567] Animal: As used herein, the term “animal” refers to any member of the animal kingdom. In some embodiments, “animal” refers to humans at any stage of development. In some embodiments, “animal” refers to non-human animals at any stage of development. In certain embodiments, the non-human animal is a mammal (e.g., a rodent, a mouse, a rat, a rabbit, a monkey, a dog, a cat, a sheep, cattle, a primate, or a pig). In some embodiments, animals include, but are not limited to, mammals, birds, reptiles, amphibians, fish, and worms. In some embodiments, the animal is a transgenic animal, genetically-engineered animal, or a clone.

[0568] Antisense strand: As used herein, the term “the antisense strand” or “the first strand” or “the guide strand” of a siRNA molecule refers to a strand that is substantially complementary to a section of about 10-50 nucleotides, e.g., about 15-30, 16-25, 18-23 or 19-22 nucleotides of the mRNA of the gene targeted for silencing. The antisense strand or first strand has sequence sufficiently complementary to the desired target mRNA sequence to direct target-specific silencing, e.g., complementarity sufficient to trigger the destruction of the desired target mRNA by the RNAi machinery or process.

[0569] Approximately: As used herein, the term “approximately” or “about,” as applied to one or more values of interest, refers to a value that is similar to a stated reference value. In certain embodiments, the term “approximately” or “about” refers to a range of values that fall within 25%, 20%, 19%, 18%, 17%, 16%, 15%, 14%, 13%, 12%, 11%, 10%, 9%, 8%, 7%, 6%, 5%, 4%, 3%, 2%, 1%, or less in either direction (greater than or less than) of the stated reference value unless otherwise stated or otherwise evident from the context (except where such number would exceed 100% of a possible value).

[0570] Associated with: As used herein, the terms “associated with,” “conjugated,” “linked,” “attached,” and “tethered,” when used with respect to two or more moieties, mean that the moieties are physically associated or connected with one another, either directly or via one or more additional moieties that serve as linking agents, to form a structure that is sufficiently stable so that the moieties remain physically associated under the conditions in which the structure is used, e.g., physiological conditions. An “association” need not be strictly through direct covalent chemical bonding. It may also suggest ionic or hydrogen bonding or a hybridization based connectivity sufficiently stable such that the “associated” entities remain physically associated.

[0571] Biomolecule: As used herein, the term “biomolecule” is any natural molecule which is amino acid-based, nucleic acid-based, carbohydrate-based or lipid-based, and the like.

[0572] Biologically active: As used herein, the phrase “biologically active” refers to a characteristic of any substance that has activity in or on a biological system and/or organism. For instance, a substance that, when administered to an organism, has a biological effect on that organism, is considered to be biologically active. In particular embodiments, a compounds and/or compositions of the present invention may be considered biologically active if even a portion of is biologically active or mimics an activity considered to biologically relevant.

[0573] Biological system: As used herein, the term “biological system” refers to a group of organs, tissues, cells, intracellular components, proteins, nucleic acids, molecules (including, but not limited to biomolecules) that function together to perform a certain biological task within cellular membranes, cellular compartments, cells, tissues, organs, organ systems, multicellular organisms, or any biological entity. In some embodiments, biological systems are cell signaling pathways comprising intracellular and/or extracellular cell signaling biomolecules. In some embodiments, biological systems comprise growth factor signaling events within the extracellular/cellular matrix and/or cellular niches.

[0574] Complementary and substantially complementary: As used herein, the term “complementary” refers to the ability of polynucleotides to form base pairs with one another. Base pairs are typically formed by hydrogen bonds between nucleotide units in antiparallel polynucleotide strands. Complementary polynucleotide strands can form base pair in the Watson-Crick manner (e.g., A to T, A to U, C to G), or in any other manner that allows for the formation of duplexes. As persons skilled in the art are aware, when using RNA as opposed to DNA, uracil rather than thymine is the base that is considered to be complementary to adenosine. However, when a U is denoted in the context of the present invention, the ability to substitute a T is implied, unless otherwise stated. Perfect complementarity or 100% complementarity refers to the situation in which each nucleotide unit of one polynucleotide strand can form hydrogen bond with a nucleotide unit of a second polynucleotide strand. Less than perfect complementarity refers to the situation in which some, but not all, nucleotide units of two strands can form hydrogen bond with each other. For example, for two 20-mers, if only two base pairs on each strand can form hydrogen bond with each other, the polynucleotide strands exhibit 10% complementarity. In the same example, if 18 base pairs on each strand can form hydrogen bonds with each other, the polynucleotide strands exhibit 90% complementarity. As used herein, the term “substantially complementary” means that the siRNA has a sequence (e.g., in the antisense strand) which is sufficient to bind the desired target mRNA, and to trigger the RNA silencing of the target mRNA.

[0575] Compound: As used herein, the term “compound” refers to a distinct chemical entity. In some embodiments, a particular compound may exist in one or more isomeric or isotopic forms (including, but not limited to stereoisomers, geometric isomers and isotopes). In some embodiments, a compound is provided or utilized in only a single such form. In some embodiments, a compound is provided or utilized as a mixture of two or more such forms (including, but not limited to a racemic mixture of stereoisomers). Those of skill in the art appreciate that some compounds exist in different such forms, show different properties and/or activities (including, but not limited to biological activities). In such cases it is within the ordinary skill of those in the art to select or avoid particular forms of the compound for use in accordance with the present invention. For example, compounds that contain asymmetrically substituted carbon atoms can be isolated in optically active or racemic forms. Methods on how to prepare optically active forms from optically active starting materials are known in the art, such as by resolution of racemic mixtures or by stereoselective synthesis.

[0576] Conserved: As used herein, the term “conserved” refers to nucleotides or amino acid residues of polynucleotide or polypeptide sequences, respectively, that are those that occur unaltered in the same position of two or more sequences being compared. Nucleotides or amino acids that are relatively conserved are those that are conserved among more related sequences than nucleotides or amino acids appearing elsewhere in the sequences.

[0577] In some embodiments, two or more sequences are said to be “completely conserved” if they are 100% identical to one another. In some embodiments, two or more sequences are said to be “highly conserved” if they are at least 70% identical, at least 80% identical, at least 90% identical, or at least 95% identical to one another. In some embodiments, two or more sequences are said to be “highly conserved” if they are about 70% identical, about 80% identical, about 90% identical, about 95%, about 98%, or about 99% identical to one another. In some embodiments, two or more sequences are said to be “conserved” if they are at least 30% identical, at least 40% identical, at least 50% identical, at least 60% identical, at least 70% identical, at least 80% identical, at least 90% identical, or at least 95% identical to one another. In some embodiments, two or more sequences are said to be “conserved” if they are about 30% identical, about 40% identical, about 50% identical, about 60% identical, about 70% identical, about 80% identical, about 90% identical, about 95% identical, about 98% identical, or about 99% identical to one another. Conservation of sequence may apply to the entire length of an oligonucleotide or polypeptide or may apply to a portion, region or feature thereof.

[0578] In one embodiment, conserved sequences are not contiguous. Those skilled in the art are able to appreciate how to achieve alignment when gaps in contiguous alignment are present between sequences, and to align corresponding residues not withstanding insertions or deletions present.

[0579] Delivery: As used herein, “delivery” refers to the act or manner of delivering compounds, substances, entities, moieties, cargoes or payloads to a target. Such target may be a cell, tissue, organ, organism, or system (whether biological or production).

[0580] Delivery Agent: As used herein, “delivery agent” refers to any agent which facilitates, at least in part, the delivery of one or more substances (including, but not limited to a compounds and/or compositions of the present invention, e.g., viral particles or expression vectors) to targeted cells.

[0581] Destabilized: As used herein, the term “destable,” “destabilize,” or “destabilizing region” means a region or molecule that is less stable than a starting, reference, wild-type or native form of the same region or molecule.

[0582] Detectable label: As used herein, “detectable label” refers to one or more markers, signals, or moieties which are attached, incorporated or associated with another entity, which markers, signals or moieties are readily detected by methods known in the art including radiography, fluorescence, chemiluminescence, enzymatic activity, absorbance, immunological detection and the like. Detectable labels may include radioisotopes, fluorophores, chromophores, enzymes, dyes, metal ions, ligands, biotin, avidin, streptavidin and haptens, quantum dots, polyhistidine tags, myc tags, flag tags, human influenza hemagglutinin (HA) tags and the like. Detectable labels may be located at any position in the entity with which they are attached, incorporated or associated. For example, when attached, incorporated in or associated with a peptide or protein, they may be within the amino acids, the peptides, or proteins, or located at the N- or C-termini.

[0583] Effective amount: As used herein, the term “effective amount” of an agent is that amount sufficient to effect beneficial or desired results, for example, upon single or multiple dose administration to a subject cell, in curing, alleviating, relieving or improving one or more symptoms of a disorder and, as such, an “effective amount” depends upon the context in which it is being applied. For example, in the context of administering an agent that treats ALS, an effective amount of an agent is, for example, an amount sufficient to achieve treatment, as defined herein, of ALS, as compared to the response obtained without administration of the agent.

[0584] Engineered: As used herein, embodiments of the invention are “engineered” when they are designed to have a feature or property, whether structural or chemical, that varies from a starting point, wild-type or native molecule. Thus, engineered agents or entities are those whose design and/or production include an act of the hand of man.

[0585] Epitope: As used herein, an “epitope” refers to a surface or region on a molecule that is capable of interacting with a biomolecule. For example a protein may contain one or more amino acids, e.g., an epitope, which interacts with an antibody, e.g., a biomolecule. In some embodiments, when referring to a protein or protein module, an epitope may comprise a linear stretch of amino acids or a three dimensional structure formed by folded amino acid chains.

[0586] Expression: As used herein, “expression” of a nucleic acid sequence refers to one or more of the following events: (1) production of an RNA template from a DNA sequence (e.g., by transcription); (2) processing of an RNA transcript (e.g., by splicing, editing, 5′ cap formation, and/or 3′ end processing); (3) translation of an RNA into a polypeptide or protein; (4) folding of a polypeptide or protein; and (5) post-translational modification of a polypeptide or protein.

[0587] Feature: As used herein, a “feature” refers to a characteristic, a property, or a distinctive element.

[0588] Formulation: As used herein, a “formulation” includes at least a compound and/or composition of the present invention and a delivery agent.

[0589] Fragment: A “fragment,” as used herein, refers to a contiguous portion of a whole. For example, fragments of proteins may comprise polypeptides obtained by digesting full-length protein isolated from cultured cells. In some embodiments, a fragment of a protein includes at least 3, 4, 5, 6, 7, 8, 9, 10, 11, 12, 13, 14, 15, 16, 17, 18, 19, 20, 25, 30, 35, 40, 45, 50, 55, 60, 65, 70, 75, 80, 85, 90, 95, 100, 150, 200, 250 or more amino acids. In some embodiments, fragments of an antibody include portions of an antibody subjected to enzymatic digestion or synthesized as such.

[0590] Functional: As used herein, a “functional” biological molecule is a biological entity with a structure and in a form in which it exhibits a property and/or activity by which it is characterized.

[0591] Fusion protein: As used herein, a “fusion protein” or “chimeric protein” is a protein created through the combination of two or more genes encoding separate proteins. Translation of this fusion gene results in one or more polypeptides with functional properties derived from each of the original proteins. In some embodiments, the fusion protein or chimeric protein can be engineered to include the full sequence of both original proteins. In other embodiments, the fusion protein or chimeric protein includes a part, such as a functional part or domain, from each of the proteins. Various spatial arrangements of the domains may be envisioned according to the present invention. It is contemplated as part of the current invention that the domains may be N-terminal, C-terminal, or interspersed with respect to each other in various orientations. In some embodiments, the fusion proteins may comprise multiple copies of a particular domain. The various domains of the fusion proteins may be connected to each other by linkers. In some embodiments, the domains may be encoded on separate polynucleotides. In some embodiments, they may be encoded on the same polynucleotide. In some embodiments, the various domains may be on the same polypeptide. In other embodiments, the domains may be on separate polypeptides. It is also understood that the fusion proteins or proteins of the present invention may be codon optimized for expression in the system of interest according to methods known in the art.

[0592] Gene expression: The term “gene expression” refers to the process by which a nucleic acid sequence undergoes successful transcription and in most instances translation to produce a protein or peptide. For clarity, when reference is made to measurement of “gene expression”, this should be understood to mean that measurements may be of the nucleic acid product of transcription, e.g., RNA or mRNA or of the amino acid product of translation, e.g., polypeptides or peptides. Methods of measuring the amount or levels of RNA, mRNA, polypeptides and peptides are well known in the art.

[0593] Homology: As used herein, the term “homology” refers to the overall relatedness between polymeric molecules, e.g. between nucleic acid molecules (e.g. DNA molecules and/or RNA molecules) and/or between polypeptide molecules. In some embodiments, polymeric molecules are considered to be “homologous” to one another if their sequences are at least 25%, 30%, 35%, 40%, 45%, 50%, 55%, 60%, 65%, 70%, 75%, 80%, 85%, 90%, 95%, or 99% identical or similar. The term “homologous” necessarily refers to a comparison between at least two sequences (polynucleotide or polypeptide sequences). In accordance with the invention, two polynucleotide sequences are considered to be homologous if the polypeptides they encode are at least about 50%, 60%, 70%, 80%, 90%, 95%, or even 99% for at least one stretch of at least about 20 amino acids. In some embodiments, homologous polynucleotide sequences are characterized by the ability to encode a stretch of at least 4-5 uniquely specified amino acids. For polynucleotide sequences less than 60 nucleotides in length, homology is typically determined by the ability to encode a stretch of at least 4-5 uniquely specified amino acids. In accordance with the invention, two protein sequences are considered to be homologous if the proteins are at least about 50%, 60%, 70%, 80%, or 90% identical for at least one stretch of at least about 20 amino acids. In many embodiments, homologous protein may show a large overall degree of homology and a high degree of homology over at least one short stretch of at least 3, 4, 5, 6, 7, 8, 9, 10, 11, 12, 13, 14, 15, 16, 17, 18, 19, 20, 25, 30, 35, 40, 45, 50 or more amino acids. In many embodiments, homologous proteins share one or more characteristic sequence elements. As used herein, the term “characteristic sequence element” refers to a motif present in related proteins. In some embodiments, the presence of such motifs correlates with a particular activity (such as biological activity).

[0594] Identity: As used herein, the term “identity” refers to the overall relatedness between polymeric molecules, e.g., between oligonucleotide molecules (e.g. DNA molecules and/or RNA molecules) and/or between polypeptide molecules. Calculation of the percent identity of two polynucleotide sequences, for example, may be performed by aligning the two sequences for optimal comparison purposes (e.g., gaps can be introduced in one or both of a first and a second nucleic acid sequences for optimal alignment and non-identical sequences can be disregarded for comparison purposes). In certain embodiments, the length of a sequence aligned for comparison purposes is at least 30%, at least 40%, at least 50%, at least 60%, at least 70%, at least 80%, at least 90%, at least 95%, or 100% of the length of the reference sequence. The nucleotides at corresponding nucleotide positions are then compared. When a position in the first sequence is occupied by the same nucleotide as the corresponding position in the second sequence, then the molecules are identical at that position. The percent identity between the two sequences is a function of the number of identical positions shared by the sequences, taking into account the number of gaps, and the length of each gap, which needs to be introduced for optimal alignment of the two sequences. The comparison of sequences and determination of percent identity between two sequences can be accomplished using a mathematical algorithm. For example, the percent identity between two nucleotide sequences can be determined using methods such as those described in Computational Molecular Biology, Lesk, A. M., ed., Oxford University Press, New York, 1988; Biocomputing: Informatics and Genome Projects, Smith, D. W., ed., Academic Press, New York, 1993; Sequence Analysis in Molecular Biology, von Heinje, G., Academic Press, 1987; Computer Analysis of Sequence Data, Part I, Griffin, A. M., and Griffin, H. G., eds., Humana Press, New Jersey, 1994; and Sequence Analysis Primer, Gribskov, M. and Devereux, J., eds., M Stockton Press, New York, 1991; each of which is incorporated herein by reference. For example, the percent identity between two nucleotide sequences can be determined, for example using the algorithm of Meyers and Miller (CABIOS, 1989, 4:11-17), which has been incorporated into the ALIGN program (version 2.0) using a PAM120 weight residue table, a gap length penalty of 12 and a gap penalty of 4. The percent identity between two nucleotide sequences can, alternatively, be determined using the GAP program in the GCG software package using an NWSgapdna.CMP matrix. Methods commonly employed to determine percent identity between sequences include, but are not limited to those disclosed in Carillo, H., and Lipman, D., SIAM J Applied Math., 48:1073 (1988); incorporated herein by reference. Techniques for determining identity are codified in publicly available computer programs. Computer software to determine homology between two sequences include, but are not limited to, GCG program package, Devereux, J., et al., Nucleic Acids Research, 12(1), 387 (1984)), BLASTP, BLASTN, and FASTA Altschul, S. F. et al., J. Molec. Biol., 215, 403 (1990)).

[0595] Inhibit expression of a gene: As used herein, the phrase “inhibit expression of a gene” means to cause a reduction in the amount of an expression product of the gene. The expression product may be RNA transcribed from the gene (e.g. mRNA) or a polypeptide translated from mRNA transcribed from the gene. Typically a reduction in the level of mRNA results in a reduction in the level of a polypeptide translated therefrom. The level of expression may be determined using standard techniques for measuring mRNA or protein.

[0596] In vitro: As used herein, the term “in vitro” refers to events that occur in an artificial environment, e.g., in a test tube or reaction vessel, in cell culture, in a Petri dish, etc., rather than within an organism (e.g., animal, plant, or microbe).

[0597] In vivo: As used herein, the term “in vivo” refers to events that occur within an organism (e.g., animal, plant, or microbe or cell or tissue thereof).

[0598] Isolated: As used herein, the term “isolated” is synonymous with “separated”, but carries with it the inference separation was carried out by the hand of man. In one embodiment, an isolated substance or entity is one that has been separated from at least some of the components with which it was previously associated (whether in nature or in an experimental setting). Isolated substances may have varying levels of purity in reference to the substances from which they have been associated. Isolated substances and/or entities may be separated from at least about 10%, about 20%, about 30%, about 40%, about 50%, about 60%, about 70%, about 80%, about 90%, or more of the other components with which they were initially associated. In some embodiments, isolated agents are more than about 80%, about 85%, about 90%, about 91%, about 92%, about 93%, about 94%, about 95%, about 96%, about 97%, about 98%, about 99%, or more than about 99% pure. As used herein, a substance is “pure” if it is substantially free of other components.

[0599] Substantially isolated: By “substantially isolated” is meant that the compound is substantially separated from the environment in which it was formed or detected. Partial separation can include, for example, a composition enriched in the compound of the present disclosure. Substantial separation can include compositions containing at least about 50%, at least about 60%, at least about 70%, at least about 80%, at least about 90%, at least about 95%, at least about 97%, or at least about 99% by weight of the compound of the present disclosure, or salt thereof. Methods for isolating compounds and their salts are routine in the art. In some embodiments, isolation of a substance or entity includes disruption of chemical associations and/or bonds. In some embodiments, isolation includes only the separation from components with which the isolated substance or entity was previously combined and does not include such disruption.

[0600] Ligand: As used herein, a “ligand” or “chemical agent” is a substance that forms a complex with a protein or fusion protein. Typically, binding is reversible. Ligand binding to a protein often leads to a conformational change in the protein which typically alters the functional state of the protein. In a non-limiting example, ligands may be activators or inhibitors. In other non-limiting examples, a ligand or chemical agent may be a small molecule, ion or protein.

[0601] Modified: As used herein, the term “modified” refers to a changed state or structure of a molecule or entity as compared with a parent or reference molecule or entity. Molecules may be modified in many ways including chemically, structurally, and functionally. In some embodiments, compounds and/or compositions of the present invention are modified by the introduction of non-natural amino acids, or non-natural nucleotides.

[0602] Mutation: As used herein, the term “mutation” refers to a change and/or alteration. In some embodiments, mutations may be changes and/or alterations to proteins (including peptides and polypeptides) and/or nucleic acids (including polynucleic acids). In some embodiments, mutations comprise changes and/or alterations to a protein and/or nucleic acid sequence. Such changes and/or alterations may comprise the addition, substitution and or deletion of one or more amino acids (in the case of proteins and/or peptides) and/or nucleotides (in the case of nucleic acids and or polynucleic acids). In embodiments wherein mutations comprise the addition and/or substitution of amino acids and/or nucleotides, such additions and/or substitutions may comprise one or more amino acid and/or nucleotide residues and may include modified amino acids and/or nucleotides.

[0603] Naturally occurring: As used herein, “naturally occurring” means existing in nature without artificial aid, or involvement of the hand of man.

[0604] Non-human vertebrate: As used herein, a “non-human vertebrate” includes all vertebrates except Homo sapiens, including wild and domesticated species. Examples of non-human vertebrates include, but are not limited to, mammals, such as alpaca, banteng, bison, camel, cat, cattle, deer, dog, donkey, gayal, goat, guinea pig, horse, llama, mule, pig, rabbit, reindeer, sheep water buffalo, and yak.

[0605] Nucleic acid: As used herein, the term “nucleic acid”, “polynucleotide” and ‘oligonucleotide” refer to any nucleic acid polymers composed of either polydeoxyribonucleotides (containing 2-deoxy-D-ribose), or polyribonucleotides (containing D-ribose), or any other type of polynucleotide which is an N glycoside of a purine or pyrimidine base, or modified purine or pyrimidine bases. There is no intended distinction in length between the term “nucleic acid”, “polynucleotide” and “oligonucleotide”, and these terms will be used interchangeably. These terms refer only to the primary structure of the molecule. Thus, these terms include double- and single-stranded DNA, as well as double- and single stranded RNA.

[0606] Off-target: As used herein, “off target” refers to any unintended effect on any one or more target, gene and/or cellular transcript.

[0607] Operably linked: As used herein, the phrase “operably linked” refers to a functional connection between two or more molecules, constructs, transcripts, entities, moieties or the like.

[0608] Particle: As used herein, a “particle” is a virus comprised of at least two components, a protein capsid and a polynucleotide sequence enclosed within the capsid.

[0609] Patient: As used herein, “patient” refers to a subject who may seek or be in need of treatment, requires treatment, is receiving treatment, will receive treatment, or a subject who is under care by a trained (e.g., licensed) professional for a particular disease or condition.

[0610] Payload: As used herein, “payload” refers to one or more polynucleotides or polynucleotide regions encoded by or within a viral genome or an expression product of such polynucleotide or polynucleotide region, e.g., a transgene, a polynucleotide encoding a polypeptide or multi-polypeptide or a modulatory nucleic acid or regulatory nucleic acid. Where regulatable elements are encoded or the payload is regulated by regulatable elements, the payload may also be referred to as a “regulatable-AAV payload.” Where CRISPR regulatable elements are encoded or the payload is regulated by a CRISPR regulatable element, the payload may also be referred to as a “CRISPR-AAV payload.”

[0611] Payload construct: As used herein, “payload construct” is one or more polynucleotide regions encoding or comprising a payload that is flanked on one or both sides by an inverted terminal repeat (ITR) sequence. The payload construct is a template that is replicated in a viral production cell to produce a viral genome. Where regulatable elements are encoded or the payload is regulated by a regulatable element, the payload construct may also be referred to as a “regulatable-AAV payload construct.” Where CRISPR regulatable elements are encoded or the payload is regulated by a CRISPR regulatable element, the payload construct may also be referred to as a “CRISPR-AAV payload construct.” In addition to the sequence encoding the payload, the payload construct may also comprise 5′ and 3′ untranslated regions (UTRs) and may also include the promoter. Payload construct vector: As used herein, “payload construct vector” is a vector encoding or comprising a payload construct, and regulatory regions for replication and expression in bacterial cells.

[0612] Payload construct expression vector: As used herein, a “payload construct expression vector” is a vector encoding or comprising a payload construct and which further comprises one or more polynucleotide regions encoding or comprising components for viral expression in a viral replication cell.

[0613] Peptide: As used herein, the term “peptide” refers to a chain of amino acids that is less than or equal to about 50 amino acids long, e.g., about 5, 10, 15, 20, 25, 30, 35, 40, 45, or 50 amino acids long.

[0614] Pharmaceutically acceptable: The phrase “pharmaceutically acceptable” is employed herein to refer to those compounds, materials, compositions, and/or dosage forms which are, within the scope of sound medical judgment, suitable for use in contact with the tissues of human beings and animals without excessive toxicity, irritation, allergic response, or other problem or complication, commensurate with a reasonable benefit/risk ratio.

[0615] Pharmaceutically acceptable excipients: As used herein, the term “pharmaceutically acceptable excipient,” as used herein, refers to any ingredient other than active agents (e.g., as described herein) present in pharmaceutical compositions and having the properties of being substantially nontoxic and non-inflammatory in subjects. In some embodiments, pharmaceutically acceptable excipients are vehicles capable of suspending and/or dissolving active agents. Excipients may include, for example: antiadherents, antioxidants, binders, coatings, compression aids, disintegrants, dyes (colors), emollients, emulsifiers, fillers (diluents), film formers or coatings, flavors, fragrances, glidants (flow enhancers), lubricants, preservatives, printing inks, sorbents, suspending or dispersing agents, sweeteners, and waters of hydration. Excipients include, but are not limited to: butylated hydroxytoluene (BHT), calcium carbonate, calcium phosphate (dibasic), calcium stearate, croscarmellose, cross-linked polyvinyl pyrrolidone, citric acid, crospovidone, cysteine, ethylcellulose, gelatin, hydroxypropyl cellulose, hydroxypropyl methylcellulose, lactose, magnesium stearate, maltitol, mannitol, methionine, methylcellulose, methyl paraben, microcrystalline cellulose, polyethylene glycol, polyvinyl pyrrolidone, povidone, pregelatinized starch, propyl paraben, retinyl palmitate, shellac, silicon dioxide, sodium carboxymethyl cellulose, sodium citrate, sodium starch glycolate, sorbitol, starch (corn), stearic acid, sucrose, talc, titanium dioxide, vitamin A, vitamin E, vitamin C, and xylitol.

[0616] Pharmaceutically acceptable salts: Pharmaceutically acceptable salts of the compounds described herein are forms of the disclosed compounds wherein the acid or base moiety is in its salt form (e.g., as generated by reacting a free base group with a suitable organic acid). Examples of pharmaceutically acceptable salts include, but are not limited to, mineral or organic acid salts of basic residues such as amines; alkali or organic salts of acidic residues such as carboxylic acids; and the like. Representative acid addition salts include acetate, adipate, alginate, ascorbate, aspartate, benzenesulfonate, benzoate, bisulfate, borate, butyrate, camphorate, camphorsulfonate, citrate, cyclopentanepropionate, digluconate, dodecylsulfate, ethanesulfonate, fumarate, glucoheptonate, glycerophosphate, hemisulfate, heptonate, hexanoate, hydrobromide, hydrochloride, hydroiodide, 2-hydroxy-ethanesulfonate, lactobionate, lactate, laurate, lauryl sulfate, malate, maleate, malonate, methanesulfonate, 2-naphthalenesulfonate, nicotinate, nitrate, oleate, oxalate, palmitate, pamoate, pectinate, persulfate, 3-phenylpropionate, phosphate, picrate, pivalate, propionate, stearate, succinate, sulfate, tartrate, thiocyanate, toluenesulfonate, undecanoate, valerate salts, and the like. Representative alkali or alkaline earth metal salts include sodium, lithium, potassium, calcium, magnesium, and the like, as well as nontoxic ammonium, quaternary ammonium, and amine cations, including, but not limited to ammonium, tetramethylammonium, tetraethylammonium, methylamine, dimethylamine, trimethylamine, triethylamine, ethylamine, and the like. Pharmaceutically acceptable salts include the conventional non-toxic salts, for example, from non-toxic inorganic or organic acids. In some embodiments a pharmaceutically acceptable salt is prepared from a parent compound which contains a basic or acidic moiety by conventional chemical methods. Generally, such salts can be prepared by reacting the free acid or base forms of these compounds with a stoichiometric amount of the appropriate base or acid in water or in an organic solvent, or in a mixture of the two; generally, nonaqueous media like ether, ethyl acetate, ethanol, isopropanol, or acetonitrile are preferred. Lists of suitable salts are found in Remington's Pharmaceutical Sciences, 17th ed., Mack Publishing Company, Easton, Pa., 1985, p. 1418, Pharmaceutical Salts: Properties, Selection, and Use, P. H. Stahl and C. G. Wermuth (eds.), Wiley-VCH, 2008, and Berge et al., Journal of Pharmaceutical Science, 66, 1-19 (1977), each of which is incorporated herein by reference in its entirety.

[0617] Pharmaceutically acceptable solvate: The term “pharmaceutically acceptable solvate,” as used herein, refers to a crystalline form of a compound wherein molecules of a suitable solvent are incorporated in the crystal lattice. For example, solvates may be prepared by crystallization, recrystallization, or precipitation from a solution that includes organic solvents, water, or a mixture thereof. Examples of suitable solvents are ethanol, water (for example, mono-, di-, and tri-hydrates), N-methylpyrrolidinone (NMP), dimethyl sulfoxide (DMSO), N,N′-dimethylformamide (DMF), N,N′-dimethylacetamide (DMAC), 1,3-dimethyl-2-imidazolidinone (DMEU), 1,3-dimethyl-3,4,5,6-tetrahydro-2-(1H)-pyrimidinone (DMPU), acetonitrile (ACN), propylene glycol, ethyl acetate, benzyl alcohol, 2-pyrrolidone, benzyl benzoate, and the like. When water is the solvent, the solvate is referred to as a “hydrate.” In some embodiments, the solvent incorporated into a solvate is of a type or at a level that is physiologically tolerable to an organism to which the solvate is administered (e.g., in a unit dosage form of a pharmaceutical composition).

[0618] Pharmacokinetic: As used herein, “pharmacokinetic” refers to any one or more properties of a molecule or compound as it relates to the determination of the fate of substances administered to living organisms. Pharmacokinetics are divided into several areas including the extent and rate of absorption, distribution, metabolism and excretion. This is commonly referred to as ADME where: (A) Absorption is the process of a substance entering the blood circulation; (D) Distribution is the dispersion or dissemination of substances throughout the fluids and tissues of the body; (M) Metabolism (or Biotransformation) is the irreversible transformation of parent compounds into daughter metabolites; and (E) Excretion (or Elimination) refers to the elimination of the substances from the body. In rare cases, some drugs irreversibly accumulate in body tissue.

[0619] Physicochemical: As used herein, “physicochemical” means of or relating to a physical and/or chemical property.

[0620] Preventing: As used herein, the term “preventing” refers to partially or completely delaying onset of an infection, disease, disorder and/or condition; partially or completely delaying onset of one or more symptoms, features, or clinical manifestations of a particular infection, disease, disorder, and/or condition; partially or completely delaying onset of one or more symptoms, features, or manifestations of a particular infection, disease, disorder, and/or condition; partially or completely delaying progression from an infection, a particular disease, disorder and/or condition; and/or decreasing the risk of developing pathology associated with the infection, the disease, disorder, and/or condition.

[0621] Proliferate: As used herein, the term “proliferate” means to grow, expand, replicate or increase or cause to grow, expand, replicate or increase. “Proliferative” means having the ability to proliferate. “Anti-proliferative” means having properties counter to or in opposition to proliferative properties.

[0622] Promoter: As used herein, the term “promoter” is a nucleotide sequence that permits binding of RNA polymerase and directs the transcription of a gene. A promoter is typically proximal to the transcriptional start site of the gene. A promoter can be inducible, repressible, constitutive, ubiquitous, tissue specific and/or synthetic (may be composed of sequences derived from different sources). The promoter may be located 5′ of the transcription start site of the payload, contained within the payload construct and may drives expression of the payload. The promoter may be located 5′ of the transcription start site of the regulatable element, and may drive the expression of the regulatable element. The size of the promoter can vary. Due to the limited packaging capacity of AAV, it is desirable to have a promoter as short as possible, while still able to provide the desired expression levels and regulation.

[0623] A synthetic promoter may be composed of sequences, such as various transcriptional elements, which are derived from different sources. A synthetic promoter may include regulatable elements, which are binding sites for transactivator or repressor fusion proteins. These fusion proteins may be components of regulatable elements. A synthetic promoter may contain transcriptional enhancer sequences. As used herein, the term “enhancer” refers to a regulatory region or element, which functions to enhance transcription. Non-limiting examples of enhancers include the CMV enhancer or portions thereof, or the UBC enhancer or portions thereof.

[0624] Protein of interest: As used herein, the terms “proteins of interest” or “desired proteins” include those provided herein and fragments, mutants, variants, and alterations thereof.

[0625] Purified: As used herein, the term “purify” means to make substantially pure or clear from unwanted components, material defilement, admixture or imperfection. “Purified” refers to the state of being pure. “Purification” refers to the process of making pure.

[0626] Region: As used herein, the term “region” refers to a zone or general area. In some embodiments, when referring to a protein or protein module, a region may comprise a linear sequence of amino acids along the protein or protein module or may comprise a three dimensional area, an epitope and/or a cluster of epitopes. In some embodiments, regions comprise terminal regions. As used herein, the term “terminal region” refers to regions located at the ends or termini of a given agent. When referring to proteins, terminal regions may comprise N- and/or C-termini. N-termini refer to the end of a protein comprising an amino acid with a free amino group. C-termini refer to the end of a protein comprising an amino acid with a free carboxyl group. N- and/or C-terminal regions may there for comprise the N- and/or C-termini as well as surrounding amino acids. In some embodiments, N- and/or C-terminal regions comprise from about 3 amino acid to about 30 amino acids, from about 5 amino acids to about 40 amino acids, from about 10 amino acids to about 50 amino acids, from about 20 amino acids to about 100 amino acids and/or at least 100 amino acids. In some embodiments, N-terminal regions may comprise any length of amino acids that includes the N-terminus, but does not include the C-terminus. In some embodiments, C-terminal regions may comprise any length of amino acids, which include the C-terminus, but do not comprise the N-terminus.

[0627] In some embodiments, when referring to a polynucleotide, a region may comprise a linear sequence of nucleic acids along the polynucleotide or may comprise a three dimensional area, secondary structure, or tertiary structure. In some embodiments, regions comprise terminal regions. As used herein, the term “terminal region” refers to regions located at the ends or termini of a given agent. When referring to polynucleotides, terminal regions may comprise 5′ and 3′ termini. 5′ termini refer to the end of a polynucleotide comprising a nucleic acid with a free phosphate group. 3′ termini refer to the end of a polynucleotide comprising a nucleic acid with a free hydroxyl group. 5′ and 3′ regions may there for comprise the 5′ and 3′ termini as well as surrounding nucleic acids. In some embodiments, 5′ and 3′ terminal regions comprise from about 9 nucleic acids to about 90 nucleic acids, from about 15 nucleic acids to about 120 nucleic acids, from about 30 nucleic acids to about 150 nucleic acids, from about 60 nucleic acids to about 300 nucleic acids and/or at least 300 nucleic acids. In some embodiments, 5′ regions may comprise any length of nucleic acids that includes the 5′ terminus, but does not include the 3′ terminus. In some embodiments, 3′ regions may comprise any length of nucleic acids, which include the 3′ terminus, but does not comprise the 5′ terminus.

[0628] Regulatable AAV Particle or Regulatable AAV Particle: As used herein, the term “regulatable-AAV particle” is an AAV particle which comprises a capsid, a polynucleotide, and one or more regulatable elements and/or a payload which is regulated by one or more regulatable elements. Where CRISPR regulatable elements are present, the AAV particle may be referred to as a “Regulatable CRISPR-AAV particle”.

[0629] Regulatable Elements: As used herein, the term “regulatable element” refers to one or more components, factors, polynucleotide features or motifs which imparts regulatable or tunable features to regulate the expression of a payload. The expression of the regulatable elements may also be further regulated.

[0630] RNA or RNA molecule: As used herein, the term “RNA” or “RNA molecule” or “ribonucleic acid molecule” refers to a polymer of ribonucleotides; the term “DNA” or “DNA molecule” or “deoxyribonucleic acid molecule” refers to a polymer of deoxyribonucleotides. DNA and RNA can be synthesized naturally, e.g., by DNA replication and transcription of DNA, respectively; or be chemically synthesized. DNA and RNA can be single-stranded (i.e., ssRNA or ssDNA, respectively) or multi-stranded (e.g., double stranded, i.e., dsRNA and dsDNA, respectively). The term “mRNA” or “messenger RNA”, as used herein, refers to a single stranded RNA that encodes the amino acid sequence of one or more polypeptide chains.

[0631] RNA interference: As used herein, the term “RNA interference” or “RNAi” refers to a sequence specific regulatory mechanism mediated by RNA molecules which results in the inhibition or interference or “silencing” of the expression of a corresponding protein-coding gene.

[0632] Sample: As used herein, the term “sample” refers to an aliquot or portion taken from a source and/or provided for analysis or processing. In some embodiments, a sample is from a biological source such as a tissue, cell or component part (e.g. a body fluid, including but not limited to blood, mucus, lymphatic fluid, synovial fluid, cerebrospinal fluid, saliva, amniotic fluid, amniotic cord blood, urine, vaginal fluid and semen). In some embodiments, a sample may be or comprise a homogenate, lysate or extract prepared from a whole organism or a subset of its tissues, cells or component parts, or a fraction or portion thereof, including but not limited to, for example, plasma, serum, spinal fluid, lymph fluid, the external sections of the skin, respiratory, intestinal, and genitourinary tracts, tears, saliva, milk, blood cells, tumors, organs. In some embodiments, a sample is or comprises a medium, such as a nutrient broth or gel, which may contain cellular components, such as proteins or nucleic acid molecule. In some embodiments, a “primary” sample is an aliquot of the source. In some embodiments, a primary sample is subjected to one or more processing (e.g., separation, purification, etc.) steps to prepare a sample for analysis or other use.

[0633] Self-complementary viral particle: As used herein, a “self-complementary viral particle” is a particle comprised of at least two components, a protein capsid and a polynucleotide sequence encoding a self-complementary genome enclosed within the capsid.

[0634] Sense strand: As used herein, the term “the sense strand” or “the second strand” or “the passenger strand” of a siRNA molecule refers to a strand that is complementary to the antisense strand or first strand. The antisense and sense strands of a siRNA molecule are hybridized to form a duplex structure. As used herein, a “siRNA duplex” includes a siRNA strand having sufficient complementarity to a section of about 10-50 nucleotides of the mRNA of the gene targeted for silencing and a siRNA strand having sufficient complementarity to form a duplex with the siRNA strand.

[0635] Signal Sequences: As used herein, the phrase “signal sequences” refers to a sequence which can direct the transport or localization.

[0636] Single unit dose: As used herein, a “single unit dose” is a dose of any therapeutic administered in one dose/at one time/single route/single point of contact, i.e., single administration event. In some embodiments, a single unit dose is provided as a discrete dosage form (e.g., a tablet, capsule, patch, loaded syringe, vial, etc.).

[0637] Similarity: As used herein, the term “similarity” refers to the overall relatedness between polymeric molecules, e.g. between polynucleotide molecules (e.g. DNA molecules and/or RNA molecules) and/or between polypeptide molecules. Calculation of percent similarity of polymeric molecules to one another can be performed in the same manner as a calculation of percent identity, except that calculation of percent similarity takes into account conservative substitutions as is understood in the art.

[0638] Small/short interfering RNA: As used herein, the term “small/short interfering RNA” or “siRNA” refers to an RNA molecule (or RNA analog) comprising between about 5-60 nucleotides (or nucleotide analogs) which is capable of directing or mediating RNAi. Preferably, a siRNA molecule comprises between about 15-30 nucleotides or nucleotide analogs, more preferably between about 16-25 nucleotides (or nucleotide analogs), even more preferably between about 18-23 nucleotides (or nucleotide analogs), and even more preferably between about 19-22 nucleotides (or nucleotide analogs) (e.g., 19, 20, 21 or 22 nucleotides or nucleotide analogs). The term “short” siRNA refers to a siRNA comprising 5-23 nucleotides, preferably 21 nucleotides (or nucleotide analogs), for example, 19, 20, 21 or 22 nucleotides. The term “long” siRNA refers to a siRNA comprising 24-60 nucleotides, preferably about 24-25 nucleotides, for example, 23, 24, 25 or 26 nucleotides. Short siRNAs may, in some instances, include fewer than 19 nucleotides, e.g., 16, 17 or 18 nucleotides, or as few as 5 nucleotides, provided that the shorter siRNA retains the ability to mediate RNAi. Likewise, long siRNAs may, in some instances, include more than 26 nucleotides, e.g., 27, 28, 29, 30, 35, 40, 45, 50, 55, or even 60 nucleotides, provided that the longer siRNA retains the ability to mediate RNAi or translational repression absent further processing, e.g., enzymatic processing, to a short siRNA. siRNAs can be single stranded RNA molecules (ss-siRNAs) or double stranded RNA molecules (ds-siRNAs) comprising a sense strand and an antisense strand which hybridized to form a duplex structure called siRNA duplex.

[0639] Split dose: As used herein, a “split dose” is the division of single unit dose or total daily dose into two or more doses.

[0640] Stable: As used herein “stable” refers to a compound or entity that is sufficiently robust to survive isolation to a useful degree of purity from a reaction mixture, and preferably capable of formulation into an efficacious therapeutic agent.

[0641] Stabilized: As used herein, the term “stabilize”, “stabilized,” “stabilized region” means to make or become stable. In some embodiments, stability is measured relative to an absolute value. In some embodiments, stability is measured relative to a reference compound or entity.

[0642] Subject: As used herein, the term “subject” or “patient” refers to any organism to which a composition in accordance with the invention may be administered, e.g., for experimental, diagnostic, prophylactic, and/or therapeutic purposes. Typical subjects include animals (e.g., mammals such as mice, rats, rabbits, non-human primates, and humans) and/or plants.

[0643] Substantially: As used herein, the term “substantially” refers to the qualitative condition of exhibiting total or near-total extent or degree of a characteristic or property of interest. One of ordinary skill in the biological arts will understand that biological and chemical phenomena rarely, if ever, go to completion and/or proceed to completeness or achieve or avoid an absolute result. The term “substantially” is therefore used herein to capture the potential lack of completeness inherent in many biological and chemical phenomena.

[0644] Substantially equal: As used herein as it relates to time differences between doses, the term means plus/minus 2%.

[0645] Substantially simultaneously: As used herein and as it relates to plurality of doses, the term typically means within about 2 seconds.

[0646] Suffering from: An individual who is “suffering from” a disease, disorder, and/or condition has been diagnosed with or displays one or more symptoms of a disease, disorder, and/or condition.

[0647] Susceptible to: An individual who is “susceptible to” a disease, disorder, and/or condition has not been diagnosed with and/or may not exhibit symptoms of the disease, disorder, and/or condition but harbors a propensity to develop a disease or its symptoms. In some embodiments, an individual who is susceptible to a disease, disorder, and/or condition (for example, cancer) may be characterized by one or more of the following: (1) a genetic mutation associated with development of the disease, disorder, and/or condition; (2) a genetic polymorphism associated with development of the disease, disorder, and/or condition; (3) increased and/or decreased expression and/or activity of a protein and/or nucleic acid associated with the disease, disorder, and/or condition; (4) habits and/or lifestyles associated with development of the disease, disorder, and/or condition; (5) a family history of the disease, disorder, and/or condition; and (6) exposure to and/or infection with a microbe associated with development of the disease, disorder, and/or condition. In some embodiments, an individual who is susceptible to a disease, disorder, and/or condition will develop the disease, disorder, and/or condition. In some embodiments, an individual who is susceptible to a disease, disorder, and/or condition will not develop the disease, disorder, and/or condition.

[0648] Synthetic: The term “synthetic” means produced, prepared, and/or manufactured by the hand of man. Synthesis of polynucleotides or polypeptides or other molecules of the present invention may be chemical or enzymatic.

[0649] Targeting: As used herein, “targeting” means the process of design and selection of nucleic acid sequence that will hybridize to a target nucleic acid and induce a desired effect.

[0650] Targeted Cells: As used herein, “targeted cells” refers to any one or more cells of interest. The cells may be found in vitro, in vivo, in situ or in the tissue or organ of an organism. The organism may be an animal, preferably a mammal, more preferably a human and most preferably a patient.

[0651] Therapeutic Agent: The term “therapeutic agent” refers to any agent that, when administered to a subject has a therapeutic, diagnostic, and/or prophylactic effect and/or elicits a desired biological and/or pharmacological effect.

[0652] Therapeutically effective amount: As used herein, the term “therapeutically effective amount” means an amount of an agent to be delivered (e.g., nucleic acid, drug, therapeutic agent, diagnostic agent, prophylactic agent, etc.) that is sufficient, when administered to a subject suffering from or susceptible to an infection, disease, disorder, and/or condition, to treat, improve symptoms of, diagnose, prevent, and/or delay the onset of the infection, disease, disorder, and/or condition. In some embodiments, a therapeutically effective amount is provided in a single dose. In some embodiments, a therapeutically effective amount is administered in a dosage regimen comprising a plurality of doses. Those skilled in the art will appreciate that in some embodiments, a unit dosage form may be considered to comprise a therapeutically effective amount of a particular agent or entity if it comprises an amount that is effective when administered as part of such a dosage regimen.

[0653] Therapeutically effective outcome: As used herein, the term “therapeutically effective outcome” means an outcome that is sufficient in a subject suffering from or susceptible to an infection, disease, disorder, and/or condition, to treat, improve symptoms of, diagnose, prevent, and/or delay the onset of the infection, disease, disorder, and/or condition.

[0654] Total daily dose: As used herein, a “total daily dose” is an amount given or prescribed in a 24 hour period. It may be administered as a single unit dose.

[0655] Treating: As used herein, the term “treating” refers to partially or completely alleviating, ameliorating, improving, relieving, delaying onset of, inhibiting progression of, reducing severity of, and/or reducing incidence of one or more symptoms or features of a particular infection, disease, disorder, and/or condition. For example, “treating” cancer may refer to inhibiting survival, growth, and/or spread of a tumor. Treatment may be administered to a subject who does not exhibit signs of a disease, disorder, and/or condition and/or to a subject who exhibits only early signs of a disease, disorder, and/or condition for the purpose of decreasing the risk of developing pathology associated with the disease, disorder, and/or condition.

[0656] Unmodified: As used herein, “unmodified” refers to any substance, compound or molecule prior to being changed in any way. Unmodified may, but does not always, refer to the wild-type or native form of a biomolecule or entity. Molecules or entities may undergo a series of modifications whereby each modified product may serve as the “unmodified” starting molecule or entity for a subsequent modification.

[0657] Untranslated regions: As used herein, “Untranslated regions” or UTRs refers to two polynucleotide sequences located on each side of a coding sequence. The polynucleotide sequence located on the 5′ side of the coding sequence is referred to as a 5′UTR and the polynucleotide sequence located on the 3′ side of the coding sequence is referred to as the 3′ UTR. As used herein, “payload 5 ‘UTR” and “payload 3′UTR” refers to the polynucleotide sequences framing the payload on the 3’ and 5′ sides. Payload 5′ and 3′ UTRs are located between the payload coding sequence and the ITRs on each side of the payload.

[0658] The 3′ UTR can contain various post-transcriptional regulatable elements which can be used to affect the stability of the message. The 3′UTR may comprise a polyadenylation sequence, such as SV40 late polyadenylation site and others known in the art. The polyadenylation sequence is typically 3′ of other regulatable elements within the 3′UTR. Post-transcriptional regulatable elements which can be used to stabilize the payload mRNA include woodchuck hepatitis virus posttranscriptional regulatable element (WPRE), hepatitis B virus posttranscriptional regulatable element (HBVPRE) RNA transport element (RTE), and any variants thereof. For example, US Publication No. US20140127162, which is herein incorporated by reference in its entirety, describes a shorter WPRE sequence, which functions comparably to the full length WPRE sequence. AU rich elements (AREs) known in the art may also be used to destabilize or to stabilize an mRNA. The 3′ end of the payload construct 3′UTR may also contain a string of Adenosines.

[0659] Vector: As used herein, a “vector” is any molecule or moiety which transports, transduces or otherwise acts as a carrier of a heterologous molecule.

[0660] Vectors of the present invention may be produced recombinantly and may be based on and/or may comprise adeno-associated virus (AAV) parent or reference sequence. Such parent or reference AAV sequences may serve as an original, second, third or subsequent sequence for engineering vectors. In non-limiting examples, such parent or reference AAV sequences may comprise any one or more of the following sequences: a polynucleotide sequence encoding a polypeptide or multi-polypeptide, which sequence may be wild-type or modified from wild-type and which sequence may encode full-length or partial sequence of a protein, protein domain, or one or more subunits of a protein; a polynucleotide comprising a modulatory or regulatory nucleic acid which sequence may be wild-type or modified from wild-type; and a transgene that may or may not be modified from wild-type sequence. These AAV sequences may serve as either the “donor” sequence of one or more codons (at the nucleic acid level) or amino acids (at the polypeptide level) or “acceptor” sequences of one or more codons (at the nucleic acid level) or amino acids (at the polypeptide level).

[0661] Viral construct vector: As used herein, a “viral construct vector” is a vector which comprises one or more polynucleotide regions encoding or comprising Rep and or Cap protein.

[0662] Viral construct expression vector: As used herein, a “viral construct expression vector” is a vector which comprises one or more polynucleotide regions encoding or comprising Rep and or Cap that further comprises one or more polynucleotide regions encoding or comprising components for viral expression in a viral replication cell.

[0663] Viral genome: As used herein, a “viral genome” is a polynucleotide encoding at least one inverted terminal repeat (ITR), at least one regulatory sequence, and at least one payload. The viral genome is derived by replication of a payload construct from the payload construct expression vector. A viral genome encodes at least one copy of the payload construct. Where regulatable elements are encoded, a viral genome encodes at least one copy of the payload construct.

[0664] Viral particle: As used herein, “viral particle” refers to a functional recombinant virus.

### EQUIVALENTS AND SCOPE

[0665] Those skilled in the art will recognize, or be able to ascertain using no more than routine experimentation, many equivalents to the specific embodiments in accordance with the invention described herein. The scope of the present invention is not intended to be limited to the above Description, but rather is as set forth in the appended claims.

[0666] In the claims, articles such as “a,” “an,” and “the” may mean one or more than one unless indicated to the contrary or otherwise evident from the context. Claims or descriptions that include “or” between one or more members of a group are considered satisfied if one, more than one, or all of the group members are present in, employed in, or otherwise relevant to a given product or process unless indicated to the contrary or otherwise evident from the context. The invention includes embodiments in which exactly one member of the group is present in, employed in, or otherwise relevant to a given product or process. The invention includes embodiments in which more than one, or the entire group members are present in, employed in, or otherwise relevant to a given product or process.

[0667] It is also noted that the term “comprising” is intended to be open and permits but does not require the inclusion of additional elements or steps. When the term “comprising” is used herein, the term “consisting of” is thus also encompassed and disclosed.

[0668] Where ranges are given, endpoints are included. Furthermore, it is to be understood that unless otherwise indicated or otherwise evident from the context and understanding of one of ordinary skill in the art, values that are expressed as ranges can assume any specific value or subrange within the stated ranges in different embodiments of the invention, to the tenth of the unit of the lower limit of the range, unless the context clearly dictates otherwise.

[0669] In addition, it is to be understood that any particular embodiment, of the present invention that falls within the prior art may be explicitly excluded from any one or more of the claims. Since such embodiments are deemed to be known to one of ordinary skill in the art, they may be excluded even if the exclusion is not set forth explicitly herein. Any particular embodiment, of the compositions of the invention (e.g., any antibiotic, therapeutic or active ingredient; any method of production; any method of use; etc.) can be excluded from any one or more claims, for any reason, whether or not related to the existence of prior art.

[0670] It is to be understood that the words which have been used are words of description rather than limitation, and that changes may be made within the purview of the appended claims without departing from the true scope and spirit of the invention in its broader aspects.

### Examples

### Example 1. Gene Expression

[0671] The level of transgene expression by regulatable-AAV particles produced and purified by the methods described herein is determined by real-time quantitative polymerase chain reaction (qPCR). A culture of 293 cells engineered to produce helper components required for AAV production is infected by regulatable-AAV particles produced as described herein.

[0672] The target 293 cells are harvested at a series of time points, lysed and the mRNA is purified. The level of transgene expressed is determined by reverse transcription (qPCR) on a thermal cycler equipped with an excitation source filters, and detector for quantification of the reaction such as, but not limited to, the 7500 FAST Real-Time PCR system (Applied Biosystems, Foster City Calif.).

[0673] Regulatable-AAV particles produced and purified by the methods described herein are treated with proteinase K, serially diluted, and PCR-amplified using a fluor such as, but not limited to, SYBR green (Applied Biosystems, Foster City, Calif.) with primers specific to the transgene sequence. A reference transgene oligonucleotide is used as a copy number standard. The cycling conditions are: 95° C. for 3 min, followed by 35 cycles of 95° C. for 30 sec, 60° C. for 30 sec, and 72° C. for 30 sec.

### Example 2. Recombinant Regulatable-AAV Production in Invertebrate Cells

[0674] The viral construct vector encodes the three structural cap proteins, VP1, VP2, and VP3, in a single open reading frame regulated by utilization of both alternative splice acceptor and non-canonical translational initiation codon(s). In-frame and out-of-frame ATG triplets preventing translation initiation at a position between the VP1 and VP2 start codons are eliminated. Both Rep78 and Rep52 are translated from a single transcript: Rep78 translation initiates at a non-AUG codon and Rep52 translation initiates at the first AUG in the transcript.

[0675] The nucleotides that encode the structural VP1, VP2, and VP3 capsid proteins and non-structural Rep78 and Rep52 proteins are contained on one viral expression construct under control of the baculovirus major late promoter.

[0676] The payload construct vector encodes two ITR sequences flanking a transgene polynucleotide encoding a polypeptide or modulatory nucleic acid and/or one or more regulatable elements. The ITR sequences allow for replication of a polynucleotide encoding the transgene and ITR sequences alone that will be packaged within the capsid of the viral construct vector. The replicated polynucleotide encodes ITR sequences on the 5′ and 3′ ends of the molecule.

[0677] The payload construct vector and viral construct vector each comprise a Tn7 transposon element that transposes the ITR and payload sequences or the Rep and Cap sequences respectively to a bacmid that comprises the attTn7 attachment site. Competent bacterial DH10 cells are transfected with either the payload construct vector or viral construct vector. The resultant viral construct expression vector and payload construct expression vector produced in the competent cell are then purified by detergent lysis and purification on DNA columns.

[0678] Separate seed cultures of Sf9 cells in serum free suspension culture are transfected with the viral construct expression vector or payload construct expression vector. The cultures are maintained for 48 hours while baculovirus is produced and released into the medium. The baculovirus released into the media continue to infect Sf9 cells in an exponential manner until all of the Sf9 cells in the culture are infected at least once. The baculoviral infected insect cells (BIIC) and media of the seed culture is harvested and divided into aliquots before being frozen in liquid nitrogen.

[0679] A naïve population of un-transfected Sf9 cells is expanded in serum free suspension cell culture conditions. Once the culture growth has reached peak log phase in 1 L of media as measured by optical density the culture is added to a large volume 20L bioreactor. The bioreactor culture is co-inoculated with a frozen viral construct expression vector and payload construct expression vector BIIC aliquot. The conditions of the Sf9 cell suspension culture is monitored by instruments that measure and/or control external variables that support the growth and activity of viral replication cells such as mass, temperature, CO2, O2, pH, and/or optical density (OD). The Sf9 culture is maintained at optimal conditions until cell population growth has reached peak log phase and before cell growth has plateaued, as measured by optical density.

[0680] In each viral replication cell that has been infected with both baculoviruses the payload flanked on one end with an ITR sequence is replicated pathway producing a viral genome and packaged in a capsid assembled from the proteins VP1, VP2, and VP3.

[0681] The viral replication cells are lysed using the Microfluidizer™ (Microfluidics International Corp., Newton, Mass.), high shear force fluid processor. The resultant cell lysate is clarified by low speed centrifugation followed by tangential flow filtration. The resultant clarified lysate is filtered by a size exclusion column to remove any remaining baculoviral particles from solution. The final steps utilize ultracentrifugation and sterile filtration to produce viral particles suitable for use as described herein.

[0682] The titer of regulatable-AAV particles produced and purified by the methods described herein is determined by real-time quantitative polymerase chain reaction (qPCR) on a thermal cycler equipped with an excitation source filters, and detector for quantification of the reaction such as, but not limited to, the 7500 FAST Real-Time PCR system (Applied Biosystems, Foster City Calif.). Regulatable-AAV particles produced and purified by the methods described herein is treated with proteinase K, serially diluted, and PCR-amplified using a fluor such as, but not limited to, SYBR green (Applied Biosystems, Foster City, Calif.) with primers specific to the AAV genome ITR sequences. A linearized viral genome is used as a copy number standard. The cycling conditions are: 95° C. for 3 min, followed by 35 cycles of 95° C. for 30 sec, 60° C. for 30 sec, and 72° C. for 30 sec.

### Example 3. Incorporation of Destabilizing Sequences or Domains

[0683] To minimize long-term dsDNA cleavage, regulatable-AAV particles with destabilizing domains and destabilizing RNA sequences are prepared, produced and tested.

### A. Destabilizing Domains—Cas9 Fusion Protein

### Overview

[0684] While not wishing to be bound by theory, destabilizing domains are known to confer instability and decrease transgene expression. The presence of the destabilizing domain can trigger the cell's proteasomal degradation systems, which then can lead to cas9 destruction. Destabilizing domains may comprise peptide sequences which are rich in a particular subset of amino acids which are thought to signal degradation, such as, but not limited to, proline, glutamic acid, serine and threonine (known as PEST sequences).

[0685] In some embodiments, destabilizing domains, which can be used in the cas9-fusion protein encoded by the payload construct expression vector include, but are not limited to, destabilizing domains from FK506 Binding Protein (FKBP), E. coli dihyrofolate reductase (DHFR), mouse ornithine decarboxylase (MODC), and estrogen receptors (ER). As a non-limiting example, the destabilizing domain may be from an estrogen receptor.

### AAV Construct Preparation and Analysis

[0686] In order to study methods to minimize unwanted long-term cleavage of dsDNA, a regulatable particle of Example 2 with a cas9-fusion protein (e.g., a cas9 endonuclease fused to a destabilizing domain) is prepared, produced and tested by methods known in the art and described herein.

[0687] The decreased protein half-life of cas9 endonuclease with a destabilizing domain is tested by transfecting HEK293 cells with the payload construct expression vectors comprising cas9 with or without destabilizing domain. Cells are lysed over a predetermined time course (e.g., 24 hours) post infection and protein extracts prepared for ELISA and Western blot analysis. Further, in separate plates, fluorescently tagged payload construct expression vectors are infected into the same cell system and fluorescence intensity is monitored over time. Additionally, cycloheximide blocking and pulse chase experiments are performed in the same cell system.

### B. Destabilizing RNA Sequences

[0688] To prepare a destabilized RNA sequence, the AAV particle of Example 2 includes a 3′UTR destabilizing sequence. This destabilized RNA sequence may be used to shorten the half-life of cas9.

[0689] One type of 3′UTR destabilizing sequence is AU-rich elements (AREs) and AUUUA motifs. While not wishing to be bound by theory these elements and motifs may be the primary means for mediating mRNA destabilization. Examples of this type of motif are evident in the 3′UTR of human estrogen receptor alpha (hERα) as well as in cytokines, proto-oncogenes and interferon mRNAs.

[0690] To determine the effectiveness of the destabilizing RNA sequence, an AAV particle which encodes cas9 and contains a destabilizing sequence, is produced and purified as in example 2. An AAV particle without the destabilizing sequence is used as a control and produced in parallel. The half-life of cas9 mRNA and/or the corresponding protein levels are analyzed over a predetermined time course in HEK293 cells. Cells are lysed over a time course post infection and RNA and protein extracts are prepared. Half-life of mRNA in both samples is measured by methods known in the art and described herein such as monitoring deadenylation via transcriptional pulsing techniques.

### Example 4. Punctuated Expression of Cas9

[0691] In order to study methods to induce transient, burst expression of cas9, an AAV particle of Example 2 which encodes cas9, a DNA binding domain and a transactivating factor is prepared, produced and tested by methods known in the art and described herein. The cas9 sequence is located in the open reading frame of the vector and a DNA binding domain (DBD) and transactivating factor are located in VP2. The transactivating factor may be coupled to the DBD.

[0692] The DBD may be a pre-engineered DBD targeted specifically to the promoter used for cas9. While not wishing to be bound by theory, upon expression of VP2 in a biological system, the DBD locates and binds to the cas9 promoter. If the transactivating factor is for cas9 and the transactivating factor is coupled to the DBD, upon DBD binding to the cas9 promoter, the transactivating factor drives expression of cas9.

[0693] The nature of the interaction between the promoter and the DBD coupled to a transactivating factor generates a transient, burst expression of cas9. This punctuated expression may be beneficial as it may limit the possibility of side-effects of extended elevated expression of cas9.

[0694] To study the burst expression of cas9, an AAV particle with the DBD and the transactivating factor is purified and produced as described in Example 2. As a control, an AAV particle lacking the DBD and transactivating domain is produced in parallel.

[0695] Expression of cas9 is measured by methods described herein and known in the art, such as in HEK293 cells for the AAV particle with or without the DBD and transactivating factor. Cells are lysed at different time points and protein extracts are prepared for ELISA and Western blot analysis.

[0696] The specificity of cas9 cleavage is confirmed by deep sequencing of samples collected and the extent of dsDNA cleavage by cas9 or cas9-destabilizing domain fusion protein is measured by ligation-mediated purification or genome modification assays such as SURVEYOR. Indel percentage is calculated from the integrated intensities of the undigested PCR product and each of the cleavage products.

### Example 5. Regulation Through a Rapamycin Inducible System

[0697] The ability of a regulatable element composed of two rapamycin inducible fusion proteins to regulate the expression of a luciferase payload is tested in vitro and in vivo.

### In Vitro Testing

[0698] The following regulatable-AAV constructs are prepared, produced and tested: AAV construct 1 contains a luciferase payload which is driven by a promoter, which is a minimal promoter into which one or more ZHFD1 binding sites are inserted. AAV construct 2 contains the elements of construct 1 and further encodes two dimerizable fusion proteins, FKBP containing the DNA-binding domain of ZHFD1 and FRAP fused to the NF-kappaB p65 transactivation domain. The dimerizable fusion proteins are expressed from one constitutive promotor, and linked together through a 2A peptide sequence. The transcription factor and the transactivation domain fusion proteins both contain a nuclear localization sequence. AAV construct 3 encodes luciferase driven by a CMV promoter for strong constitutive expression (positive control). AAV construct 4 encodes luciferase driven by a CMV promoter for strong constitutive expression and the dimerization fusion proteins driven by a constitutive promoter (positive control).

[0699] Two AAV vectors can be used for transduction, one expressing the regulatable elements (dimerizable transcription factors) and the other expressing the luciferase payload. These are be delivered at a ratio determined to be optimal. Alternatively, one vector is used for transduction, expressing the regulatable elements and the luciferase payload.

[0700] HeLa cells are transduced with the AAV vector(s) constructs 1 through 4, according to methods known in the art in triplicate for each assay. The transduced HeLa cells are incubated in medium in the presence or absence of rapamycin for a set time. Subsequently, cells are harvested according to a time course which includes 24, 48, and 72 hours. The cells are lysed and luciferase activity is measured and compared between untreated and rapamycin treated samples 1 and 2 and the controls (samples 3 and 4).

### In Vivo Testing

[0701] The AAV constructs 1, 2 and 3 are prepared, produced and tested. In addition, a fifth construct derived from construct 2 is prepared, in which the constitutive promoter driving the expression of the dimerizable fusion proteins is replaced by a tissue-specific promoter (liver specific).

[0702] AAV particles containing constructs 1-3 and 5 are each injected into two mice of 3 to 5 months of age according to methods known in the art. At a set time post injection, a further injection of rapamycin is administered to half of the mice. At a predetermined time, mice are injected with luciferin. Animals are then anesthetized and images are acquired with an imaging system. Bioluminescence is measured as total flux (photons/second) of the entire mouse.

### Example 6. Regulation Through a CRISPR Regulatable Element

[0703] The ability of a CRISPR regulatable elements to regulate the expression of a luciferase payload composed of one or more CRISPR recognition sequences is tested in vitro and in vivo. Cleavage of the payload construct at the CRISPR recognition sequence ablates the payload expression. Using Cas9 with a destabilizing domain shortens the half-life of Cas9.

### In Vitro Testing

[0704] The following CRISPR-AAV constructs are prepared, produced and tested.

[0705] AAV construct 1 encodes a luciferase payload, which is driven by a constitutive promoter and which contains a CRISPR recognition sequence. The recognition sequence is chosen using methods known in the art and described herein to ensure that the sequence is unique to the viral genome and does not occur in the host genome. The AAV construct 2, which contains all of the components of construct 1, and additionally encodes a guide RNA specific to the CRISPR recognition sequence in the luciferase payload and a codon optimized Cas9 with a destabilizing domain. The guide RNA and Cas9 are both expressed from a constitutive promotor. Cas9 also contains a nuclear localization sequence. AAV construct 3 encodes luciferase driven by a CMV promoter without the CRISPR recognition sequence (positive control). AAV construct 4 contains all of the elements of construct 3, and further encodes a guide RNA specific to the CRISPR recognition sequence located in the luciferase payload and a Cas9 with a destabilizing domain. The guide RNA and Cas9 are both expressed from a constitutive promotor. Cas9 also contains a nuclear localization sequence.

[0706] In one example, two AAV vectors are used for transduction, one expressing the regulatable elements (Cas9 and guide RNA) and the other expressing the luciferase payload. These two vectors are delivered at a ratio determined to be optimal. Alternatively, one vector is used for transduction, expressing the regulatable elements and the luciferase payload.

[0707] HeLa cells are transduced with the AAV vector(s) constructs 1 through 4, according to methods known in the art in triplicate for each assay. The transduced HeLa cells are incubated in medium. Subsequently, cells are harvested according to a time course which includes 24, 48, and 72 hours. The cells are lysed and luciferase activity is measured and compared between the samples.

[0708] If the regulatable elements and the luciferase payload are on two separate vectors, the effective dose of the CRISPR regulatable element is determined. HeLa cells are transduced with construct 1 and different doses of the AAV vector encoding Cas9 and the guide RNA, each in triplicate. Cells are harvested, lysed and luciferase activity is measured for each dose of Cas9 and guide RNA employed.

### In Vivo Testing

[0709] The AAV constructs 1 and 2 are prepared, produced and tested. AAV particles 1 and 2 are each injected into mice of 3 to 5 months of age according to methods known in the art. At a set time post injection, such as for example 2 weeks, mice are injected with luciferin. Animals are then anesthetized and images are acquired with an imaging system. Bioluminescence is measured as total flux (photons/second) of the entire mouse and compared between the samples.

### Example 7. Regulation Through an Inducible Element and a CRISPR Regulatable Element

[0710] The ability of an inducible system to regulate a CRISPR regulatable element, which in turn can regulate the payload in the context of AAV transduction is tested in vitro and in vivo. The ability of a regulatable element composed of two rapamycin inducible fusion proteins to regulate the expression of a CRISPR regulatable element is tested in vitro.

### In Vitro Testing

[0711] The following CRISPR-AAV constructs are prepared, produced and tested. AAV construct 1 encodes a luciferase payload, which contains a CRISPR recognition sequence, driven by a constitutive promoter. The recognition sequence is chosen using methods known in the art and described herein to ensure that the sequence is unique to the viral genome and does not occur in the host genome. AAV construct 2 contains the components of construct 1 and additionally encodes a guide RNA specific to the CRISPR recognition sequence located in the luciferase payload and a codon optimized Cas9 with a destabilizing domain. The guide RNA and Cas9 are both expressed from a constitutive promotor. Cas9 also contains a nuclear localization sequence. AAV construct 3 contains all of the components of construct 1, and additionally encodes a guide RNA specific to the CRISPR recognition sequence located in the luciferase payload and a codon optimized Cas9 with a destabilizing domain. The guide RNA and Cas9 are both expressed from a minimal promotor into which one or more ZHFD1 binding sites are inserted. Cas9 also contains a nuclear localization sequence. AAV construct 4 contains all of the components of construct 3, and additionally encodes two dimerizable fusion proteins, FKBP containing the DNA-binding domain of ZHFD1 and FRAP fused to the NF-kappaB p65 transactivation domain. The dimerizable fusion proteins are expressed from one constitutive promotor, and linked together through a 2A peptide sequence. The transcription factor and the transactivation domain fusion proteins both contain a nuclear localization sequence.

[0712] Two or more AAV vectors can be used for transduction, one or more expressing the regulatable elements (Cas9 and guide RNA, and dimerizable fusion proteins) and an additional vector expressing the luciferase payload. Alternatively, three AAV vectors are used, one encoding the CRISPR regulatable elements, one encoding the dimerizable fusion proteins, and one encoding the luciferase payload. These vectors are delivered at a ratio determined to be optimal. In another embodiment, one vector is used for transduction, expressing the regulatable elements and the luciferase payload. In one embodiment, an open reading frame for the DNA binding domain fusion protein and/or transactivation domain fusion protein is located in VP2.

[0713] HeLa cells are transduced with the AAV vector constructs 1 through 4, according to methods known in the art in triplicate for each assay. The transduced HeLa cells are incubated in medium in the presence or absence of rapamycin for a set time. Subsequently, cells are harvested according to a time course which includes 24, 48, and 72 hours. The cells are lysed and luciferase activity is measured. Throughout the time course, luciferase activity is compared between untreated and rapamycin treated samples for each AAV vector construct and also between samples transduced with the vector constructs 1 through 4.

### In Vivo Testing

[0714] The AAV constructs 1-4 are prepared, produced and tested. In addition, a 5th construct may be added, which is the same as 4, except that the fusion proteins are driven by a tissue specific promoter, such as a liver specific promoter. AAV particles 1-4 are each injected into two mice of 3 to 5 months of age according to methods known in the art. At approximately 2 weeks post injection, a further injection of rapamycin is administered to half of the mice. At a predetermined time, mice are injected with luciferin. Animals are then anesthetized and images are acquired with an imaging system. Bioluminescence is measured as total flux (photons/second) of the entire mouse. Luciferase activity is compared between untreated and rapamycin treated animals and also between animals injected with the AAV particles 1-4.

### Example 8. Regulation Through an Inducible Element and a TALEN Regulatable Element

[0715] The ability of an inducible system to regulate a TALEN regulatable element, which in turn can regulate the payload in the context of AAV transduction is tested in vitro and in vivo. The ability of a tetracycline regulatable element to regulate the expression of a TALEN regulatable element is tested in vitro.

### In Vitro Testing

[0716] The following regulatable-AAV constructs are prepared, produced and tested. AAV construct 1 encodes a luciferase payload which contains a TALEN recognition sequence driven by a constitutive promoter. The recognition sequence is chosen using methods known in the art and described herein to ensure that the sequence is unique to the viral genome and does not occur in the host genome. AAV construct 2 contains all of the components of construct 1 and further encodes a TALEN, expressed from a constitutive promoter. The TALEN also contains a nuclear localization sequence. AAV construct 3 contains all of the components of construct 1 and additionally encodes a TALEN, whose expression is driven from a minimal promotor into which one or more tetracycline response elements (TRE) are inserted. The TALEN also contains a nuclear localization sequence. AAV construct 4 contains all of the components of construct 3, and additionally encodes a tetracycline transactivator protein (fusion protein of tetracycline repressor TetR and VP16 transactivation domain), driven by a constitutive promoter. The tetracycline transactivator protein contains a nuclear localization sequence.

[0717] In one example, two AAV vectors are used for transduction, one expressing the tetracycline regulatable element and the other expressing the luciferase payload. These vectors are delivered at a ratio determined to be optimal. Alternatively, one vector is used for transduction, expressing the tetracycline regulatable element and the luciferase payload. In one exemplary setup, an open reading frame for the tetracycline regulatable element fusion protein is located in VP2.

[0718] HeLa cells are transduced with the AAV vector constructs 1 through 4, according to methods known in the art in triplicate for each assay. The transduced HeLa cells are incubated in medium in the presence or absence of tetracycline for a set time. Subsequently, cells are harvested according to a time course which includes 24, 48, and 72 hours. The cells are lysed and luciferase activity is measured. Throughout the time course, luciferase activity is compared between untreated and tetracycline treated samples for each AAV vector construct and also between samples transduced with the vector constructs 1 through 4.

### Example 9. Regulation of a CRISPR Regulatable Element Through a Rapamycin-Inducible Destabilizing Domain

[0719] The ability of a CRISPR regulatable element proteins to regulate the expression of a luciferase payload containing one or more CRISPR recognition sequences is tested. Cleavage of the payload construct at the CRISPR recognition sequence ablates the payload expression. Using Cas9 with a destabilizing domain, which is stabilized by an inducer, allows the Cas9 to be permanently turned off in the absence of inducer. FK506- and rapamycin-binding protein domain is chosen, which can be regulated by rapamycin and its analogs, and is unstable in the absence of its ligand.

### In Vitro Testing

[0720] The following CRISPR-AAV constructs are prepared, produced and tested. AAV construct 1 encodes a luciferase payload, which contains a CRISPR recognition sequence, driven by a constitutive promoter. The recognition sequence is chosen using methods known in the art and described herein to ensure that the sequence is unique to the viral genome and does not occur in the host genome. AAV construct 2 contains the components of construct 1 and additionally encodes a guide RNA specific to the CRISPR recognition sequence located in the luciferase payload and a Cas9 without a destabilizing domain. The guide RNA and Cas9 are both expressed from a constitutive promotor. Cas9 also contains a nuclear localization sequence. AAV construct 3 includes all of the components of construct 1, and additionally encodes a guide RNA specific to the CRISPR recognition sequence found in the luciferase payload and a codon optimized Cas9 with FKBP12 destabilizing domain. The guide RNA and Cas9 are both expressed from a constitutive promotor. Cas9 also contains a nuclear localization sequence.

[0721] In one experimental setup, two or more AAV vectors are used for transduction, one or more vectors expressing the regulatable elements (Cas9 and guide RNA) and the other expressing the luciferase payload. These two vectors are delivered at a ratio determined to be optimal. Alternatively, one vector is used for transduction, expressing the regulatable elements and the luciferase payload.

[0722] HeLa cells are transduced with the AAV vector constructs 1 through 4, according to methods known in the art in triplicate for each assay. The transduced HeLa cells are incubated in medium in the presence or absence of rapamycin for a set time. Subsequently, cells are harvested according to a time course which includes 24, 48, and 72 hours. The cells are lysed and luciferase activity is measured. Throughout the time course, luciferase activity is compared between untreated and rapamycin treated samples for each AAV vector construct and also between samples transduced with the vector constructs 1 through 4.

[0723] Reversibility of the treatment is also tested. For samples transduced with AAV vector 3 and treated with rapamycin for 72 hours, rapamycin is removed from the growth medium for about 24 hours, and the cells are lysed and luciferase activity is measured.

### Example 10. Regulation Through an siRNA Regulatable Element

[0724] The ability of a siRNA regulatable element proteins to regulate the expression of a luciferase payload containing an siRNA binding sequence is tested in vitro and in vivo. Upon binding of the siRNA to the payload construct mRNA, the mRNA is targeted for degradation.

### In Vitro Testing

[0725] The following regulatable-AAV constructs are prepared, produced and tested. AAV construct 1 contains a luciferase payload, which contains a siRNA binding sequence, driven by a constitutive promoter. The binding sequence is chosen using methods known in the art to ensure that the sequence is unique to the viral mRNA and does not occur in the host exome. AAV construct 2 contains all of the components of construct 1 and additionally encodes a siRNA specific to the siRNA binding sequence located in the luciferase payload construct. The siRNA is expressed from a constitutive promotor. AAV construct 3 encodes luciferase driven by a CMV promoter without the siRNA binding sequence (positive control). The AAV construct 4 encodes luciferase driven by a CMV promoter without the siRNA binding sequence and additionally encodes the siRNA, expressed from a constitutive promoter.

[0726] Two AAV vectors can be used for transduction, one expressing the siRNA and the other expressing the luciferase payload. These two vectors are delivered at a ratio determined to be optimal. Alternatively, one vector may be used for transduction, expressing the siRNA and the luciferase payload.

[0727] HeLa cells are transduced with the AAV vector(s) constructs 1 through 4, according to methods known in the art in triplicate for each assay. The transduced HeLa cells are incubated in medium. Subsequently, cells are harvested according to a time course which includes 24, 48, and 72 hours. The cells are lysed and luciferase activity is measured and compared between the samples.

[0728] If the regulatable elements and the luciferase payload are on 2 separate vectors, the effective dose of the siRNA is determined. HeLa cells are transduced with Construct 1 and different doses of the AAV vector comprising the siRNA, each in triplicate. Cells are harvested, lysed and luciferase activity is measured for each dose of Cas9 and guide RNA employed.

[0729] While the present invention has been described at some length and with some particularity with respect to the several described embodiments, it is not intended that it should be limited to any such particulars or embodiments or any particular embodiment, but it is to be construed with references to the appended claims so as to provide the broadest possible interpretation of such claims in view of the prior art and, therefore, to effectively encompass the intended scope of the invention.

[0730] All publications, patent applications, patents, and other references mentioned herein are incorporated by reference in their entirety. In case of conflict, the present specification, including definitions, will control. In addition, section headings, the materials, methods, and examples are illustrative only and not intended to be limiting.

The application's sequence listing, which the Patent Office published only in electronic form, follows.

SEQUENCE LISTING (791 sequences)

SEQ ID NO: 1 - DNA, 2211 bp, Adeno-associated virus 1
atggctgccgatggttatcttccagattggctcgaggacaacctctctgagggcattcgcgagtggtgggacttgaaacctggagccccgaagcccaaagccaaccagcaaaagcaggacgacggccggggtctggtgcttcctggctacaagtacctcggacccttcaacggactcgacaagggggagcccgtcaacgcggcggacgcagcggccctcgagcacgacaaggcctacgaccagcagctcaaagcgggtgacaatccgtacctgcggtataaccacgccgacgccgagtttcaggagcgtctgcaagaagatacgtcttttgggggcaacctcgggcgagcagtcttccaggccaagaagcgggttctcgaacctctcggtctggttgaggaaggcgctaagacggctcctggaaagaaacgtccggtagagcagtcgccacaagagccagactcctcctcgggcatcggcaagacaggccagcagcccgctaaaaagagactcaattttggtcagactggcgactcagagtcagtccccgatccacaacctctcggagaacctccagcaacccccgctgctgtgggacctactacaatggcttcaggcggtggcgcaccaatggcagacaataacgaaggcgccgacggagtgggtaatgcctcaggaaattggcattgcgattccacatggctgggcgacagagtcatcaccaccagcacccgcacctgggccttgcccacctacaataaccacctctacaagcaaatctccagtgcttcaacgggggccagcaacgacaaccactacttcggctacagcaccccctgggggtattttgatttcaacagattccactgccacttttcaccacgtgactggcagcgactcatcaacaacaattggggattccggcccaagagactcaacttcaaactcttcaacatccaagtcaaggaggtcacgacgaatgatggcgtcacaaccatcgctaataaccttaccagcacggttcaagtcttctcggactcggagtaccagcttccgtacgtcctcggctctgcgcaccagggctgcctccctccgttcccggcggacgtgttcatgattccgcaatacggctacctgacgctcaacaatggcagccaagccgtgggacgttcatccttttactgcctggaatatttcccttctcagatgctgagaacgggcaacaactttaccttcagctacacctttgaggaagtgcctttccacagcagctacgcgcacagccagagcctggaccggctgatgaatcctctcatcgaccaatacctgtattacctgaacagaactcaaaatcagtccggaagtgcccaaaacaaggacttgctgtttagccgtgggtctccagctggcatgtctgttcagcccaaaaactggctacctggaccctgttatcggcagcagcgcgtttctaaaacaaaaacagacaacaacaacagcaattttacctggactggtgcttcaaaatataacctcaatgggcgtgaatccatcatcaaccctggcactgctatggcctcacacaaagacgacgaagacaagttctttcccatgagcggtgtcatgatttttggaaaagagagcgccggagcttcaaacactgcattggacaatgtcatgattacagacgaagaggaaattaaagccactaaccctgtggccaccgaaagatttgggaccgtggcagtcaatttccagagcagcagcacagaccctgcgaccggagatgtgcatgctatgggagcattacctggcatggtgtggcaagatagagacgtgtacctgcagggtcccatttgggccaaaattcctcacacagatggacactttcacccgtctcctcttatgggcggctttggactcaagaacccgcctcctcagatcctcatcaaaaacacgcctgttcctgcgaatcctccggcggagttttcagctacaaagtttgcttcattcatcacccaatactccacaggacaagtgagtgtggaaattgaatgggagctgcagaaagaaaacagcaagcgctggaatcccgaagtgcagtacacatccaattatgcaaaatctgccaacgttgattttactgtggacaacaatggactttatactgagcctcgccccattggcacccgttaccttacccgtcccctgtaa

SEQ ID NO: 2 - protein, 736 aa, Adeno-associated virus 1
MAADGYLPDWLEDNLSEGIREWWDLKPGAPKPKANQQKQDDGRGLVLPGYKYLGPFNGLDKGEPVNAADAAALEHDKAYDQQLKAGDNPYLRYNHADAEFQERLQEDTSFGGNLGRAVFQAKKRVLEPLGLVEEGAKTAPGKKRPVEQSPQEPDSSSGIGKTGQQPAKKRLNFGQTGDSESVPDPQPLGEPPATPAAVGPTTMASGGGAPMADNNEGADGVGNASGNWHCDSTWLGDRVITTSTRTWALPTYNNHLYKQISSASTGASNDNHYFGYSTPWGYFDFNRFHCHFSPRDWQRLINNNWGFRPKRLNFKLFNIQVKEVTTNDGVTTIANNLTSTVQVFSDSEYQLPYVLGSAHQGCLPPFPADVFMIPQYGYLTLNNGSQAVGRSSFYCLEYFPSQMLRTGNNFTFSYTFEEVPFHSSYAHSQSLDRLMNPLIDQYLYYLNRTQNQSGSAQNKDLLFSRGSPAGMSVQPKNWLPGPCYRQQRVSKTKTDNNNSNFTWTGASKYNLNGRESIINPGTAMASHKDDEDKFFPMSGVMIFGKESAGASNTALDNVMITDEEEIKATNPVATERFGTVAVNFQSSSTDPATGDVHAMGALPGMVWQDRDVYLQGPIWAKIPHTDGHFHPSPLMGGFGLKNPPPQILIKNTPVPANPPAEFSATKFASFITQYSTGQVSVEIEWELQKENSKRWNPEVQYTSNYAKSANVDFTVDNNGLYTEPRPIGTRYLTRPL

SEQ ID NO: 3 - DNA, 4718 bp, Adeno-associated virus 1
ttgcccactccctctctgcgcgctcgctcgctcggtggggcctgcggaccaaaggtccgcagacggcagagctctgctctgccggccccaccgagcgagcgagcgcgcagagagggagtgggcaactccatcactaggggtaatcgcgaagcgcctcccacgctgccgcgtcagcgctgacgtaaattacgtcataggggagtggtcctgtattagctgtcacgtgagtgcttttgcgacattttgcgacaccacgtggccatttagggtatatatggccgagtgagcgagcaggatctccattttgaccgcgaaatttgaacgagcagcagccatgccgggcttctacgagatcgtgatcaaggtgccgagcgacctggacgagcacctgccgggcatttctgactcgtttgtgagctgggtggccgagaaggaatgggagctgcccccggattctgacatggatctgaatctgattgagcaggcacccctgaccgtggccgagaagctgcagcgcgacttcctggtccaatggcgccgcgtgagtaaggccccggaggccctcttctttgttcagttcgagaagggcgagtcctacttccacctccatattctggtggagaccacgggggtcaaatccatggtgctgggccgcttcctgagtcagattagggacaagctggtgcagaccatctaccgcgggatcgagccgaccctgcccaactggttcgcggtgaccaagacgcgtaatggcgccggaggggggaacaaggtggtggacgagtgctacatccccaactacctcctgcccaagactcagcccgagctgcagtgggcgtggactaacatggaggagtatataagcgcctgtttgaacctggccgagcgcaaacggctcgtggcgcagcacctgacccacgtcagccagacccaggagcagaacaaggagaatctgaaccccaattctgacgcgcctgtcatccggtcaaaaacctccgcgcgctacatggagctggtcgggtggctggtggaccggggcatcacctccgagaagcagtggatccaggaggaccaggcctcgtacatctccttcaacgccgcttccaactcgcggtcccagatcaaggccgctctggacaatgccggcaagatcatggcgctgaccaaatccgcgcccgactacctggtaggccccgctccgcccgcggacattaaaaccaaccgcatctaccgcatcctggagctgaacggctacgaacctgcctacgccggctccgtctttctcggctgggcccagaaaaggttcgggaagcgcaacaccatctggctgtttgggccggccaccacgggcaagaccaacatcgcggaagccatcgcccacgccgtgcccttctacggctgcgtcaactggaccaatgagaactttcccttcaatgattgcgtcgacaagatggtgatctggtgggaggagggcaagatgacggccaaggtcgtggagtccgccaaggccattctcggcggcagcaaggtgcgcgtggaccaaaagtgcaagtcgtccgcccagatcgaccccacccccgtgatcgtcacctccaacaccaacatgtgcgccgtgattgacgggaacagcaccaccttcgagcaccagcagccgttgcaggaccggatgttcaaatttgaactcacccgccgtctggagcatgactttggcaaggtgacaaagcaggaagtcaaagagttcttccgctgggcgcaggatcacgtgaccgaggtggcgcatgagttctacgtcagaaagggtggagccaacaaaagacccgcccccgatgacgcggataaaagcgagcccaagcgggcctgcccctcagtcgcggatccatcgacgtcagacgcggaaggagctccggtggactttgccgacaggtaccaaaacaaatgttctcgtcacgcgggcatgcttcagatgctgtttccctgcaagacatgcgagagaatgaatcagaatttcaacatttgcttcacgcacgggacgagagactgttcagagtgcttccccggcgtgtcagaatctcaaccggtcgtcagaaagaggacgtatcggaaactctgtgccattcatcatctgctggggcgggctcccgagattgcttgctcggcctgcgatctggtcaacgtggacctggatgactgtgtttctgagcaataaatgacttaaaccaggtatggctgccgatggttatcttccagattggctcgaggacaacctctctgagggcattcgcgagtggtgggacttgaaacctggagccccgaagcccaaagccaaccagcaaaagcaggacgacggccggggtctggtgcttcctggctacaagtacctcggacccttcaacggactcgacaagggggagcccgtcaacgcggcggacgcagcggccctcgagcacgacaaggcctacgaccagcagctcaaagcgggtgacaatccgtacctgcggtataaccacgccgacgccgagtttcaggagcgtctgcaagaagatacgtcttttgggggcaacctcgggcgagcagtcttccaggccaagaagcgggttctcgaacctctcggtctggttgaggaaggcgctaagacggctcctggaaagaaacgtccggtagagcagtcgccacaagagccagactcctcctcgggcatcggcaagacaggccagcagcccgctaaaaagagactcaattttggtcagactggcgactcagagtcagtccccgatccacaacctctcggagaacctccagcaacccccgctgctgtgggacctactacaatggcttcaggcggtggcgcaccaatggcagacaataacgaaggcgccgacggagtgggtaatgcctcaggaaattggcattgcgattccacatggctgggcgacagagtcatcaccaccagcacccgcacctgggccttgcccacctacaataaccacctctacaagcaaatctccagtgcttcaacgggggccagcaacgacaaccactacttcggctacagcaccccctgggggtattttgatttcaacagattccactgccacttttcaccacgtgactggcagcgactcatcaacaacaattggggattccggcccaagagactcaacttcaaactcttcaacatccaagtcaaggaggtcacgacgaatgatggcgtcacaaccatcgctaataaccttaccagcacggttcaagtcttctcggactcggagtaccagcttccgtacgtcctcggctctgcgcaccagggctgcctccctccgttcccggcggacgtgttcatgattccgcaatacggctacctgacgctcaacaatggcagccaagccgtgggacgttcatccttttactgcctggaatatttcccttctcagatgctgagaacgggcaacaactttaccttcagctacacctttgaggaagtgcctttccacagcagctacgcgcacagccagagcctggaccggctgatgaatcctctcatcgaccaatacctgtattacctgaacagaactcaaaatcagtccggaagtgcccaaaacaaggacttgctgtttagccgtgggtctccagctggcatgtctgttcagcccaaaaactggctacctggaccctgttatcggcagcagcgcgtttctaaaacaaaaacagacaacaacaacagcaattttacctggactggtgcttcaaaatataacctcaatgggcgtgaatccatcatcaaccctggcactgctatggcctcacacaaagacgacgaagacaagttctttcccatgagcggtgtcatgatttttggaaaagagagcgccggagcttcaaacactgcattggacaatgtcatgattacagacgaagaggaaattaaagccactaaccctgtggccaccgaaagatttgggaccgtggcagtcaatttccagagcagcagcacagaccctgcgaccggagatgtgcatgctatgggagcattacctggcatggtgtggcaagatagagacgtgtacctgcagggtcccatttgggccaaaattcctcacacagatggacactttcacccgtctcctcttatgggcggctttggactcaagaacccgcctcctcagatcctcatcaaaaacacgcctgttcctgcgaatcctccggcggagttttcagctacaaagtttgcttcattcatcacccaatactccacaggacaagtgagtgtggaaattgaatgggagctgcagaaagaaaacagcaagcgctggaatcccgaagtgcagtacacatccaattatgcaaaatctgccaacgttgattttactgtggacaacaatggactttatactgagcctcgccccattggcacccgttaccttacccgtcccctgtaattacgtgttaatcaataaaccggttgattcgtttcagttgaactttggtctcctgtccttcttatcttatcggttaccatggttatagcttacacattaactgcttggttgcgcttcgcgataaaagacttacgtcatcgggttacccctagtgatggagttgcccactccctctctgcgcgctcgctcgctcggtggggcctgcggaccaaaggtccgcagacggcagagctctgctctgccggccccaccgagcgagcgagcgcgcagagagggagtgggcaa

SEQ ID NO: 4 - DNA, 3131 bp, Adeno-associated virus
gcggccgcgaattcgcccttggctgcgtcaactggaccaatgagaactttcccttcaatgattgcgtcgacaagatggtgatctggtgggaggagggcaagatgacggccaaggtcgtggagtccgccaaggccattctcggcggcagcaaggtgcgcgtggaccaaaagtgcaagtcgtccgcccagatcgaccccacccccgtgatcgtcacctccaacaccaacatgtgcgccgtgattgacgggaacagcaccaccttcgagcaccagcagcctctccaggaccggatgtttaagttcgaactcacccgccgtctggagcacgactttggcaaggtgacaaagcaggaagtcaaagagttcttccgctgggccagtgatcacgtgaccgaggtggcgcatgagttttacgtcagaaagggcggagccagcaaaagacccgcccccgatgacgcggataaaagcgagcccaagcgggcctgcccctcagtcgcggatccatcgacgtcagacgcggaaggagctccggtggactttgccgacaggtaccaaaacaaatgttctcgtcacgcgggcatgcttcagatgctgtttccctgcaaaacgtgcgagagaatgaatcggaatttcaacatttgcttcacacacggggtcagagactgctcagagtgtttccccggcgtgtcagaatctcaaccggtcgtcagaaagaggacgtatcggaaactccgtgcgattcatcatctgctggggcgggctcccgagattgcttgctcggcctgcgatctggtcaacgtggacctggatgactgtgtttctgagcaataaatgacttaaaccaggtatggctgccgatggttatcttccagattggctcgaggacaacctctctgagggcattcgcgagtggtgggcgctgaaacctggagccccgaagcccaaagccaaccagcaaaagcaggacgacggccggggtctggtgcttcctggctacaagtacctcggacccttcaacggactcgacaagggggagcccgtcaacgcggcggacgcagcggccctcgagcacgacaaggcttacgaccagcagctgcaggcgggtgacaatccgtacctgcggtataaccacgccgacgccgagtttcaggagcgtctgcaagaagatacgtcttttgggggcaacctcgggcgagcagtcttccaggccaagaagcgggttctcgaacctctcggtctggttgaggaaggcgctaagacggctcctggaaagaagagaccggtagagccatcaccccagcgttctccagactcctctacgggcatcggcaagaaaggccaacagcccgccagaaaaagactcaattttggtcagactggcgactcagagtcagttccagaccctcaacctctcggagaacctccagcagcgccctctggtgtgggacctaatacaatggctgcaggcggtggcgcaccaatggcagacaataacgaaggcgccgacggagtgggtagttcctcgggaaattggcattgcgattccacatggctgggcgacagagtcatcaccaccagcacccgaacctgggccctgcccacctacaacaaccacctctacaagcaaatctccaacgggacatcgggaggagccaccaacgacaacacctacttcggctacagcaccccctgggggtattttgactttaacagattccactgccacctttcaccacgtgactggcagcgactcatcaacaacaactggggattccgacccaagagactcagcttcaagctcttcaacatccaggtcaaggaggtcacgcagaatgaaggcaccaagaccatcgccaataacctcaccagcaccatccaggtgtttacggactcggagtaccagctgccgtacgttctcggctctgtccaccagggctgcctgcctccgttcccggcggacgtgttcatgattccccagtacggctacctaacactcaacaacggtagtcaggccgtgggacgctcctccttctactgcctggaatactttccttcgcagatgctgagaaccggcaacaacttccagtttacttacaccttcgaggacgtgcctttccacagcagctacgcccacagctagagcttggaccggctgatgaatcctctgattgaccagtacctgtactacttgtctcggactcaaacaacaggaggcacggcaaatacgcagactctgggcttcagccaaggtgggcctaatacaatggccaatcaggcaaagaactggctgccaggaccctgttaccgccaacaacgcgtctcaacgacaaccgggcaaaacaacaatagcaactttgcctggactgctgggaccaaataccatctgaatggaagaaattcattggctaatcctggcatcgctatggcaacacacaaagacgacgaggagcgtttttttcccagtaacgggatcctgatttttggcaaacaaaatgctgccagagacaatgcggattacagcgatgtcatgctcaccagcgaggaagaaatcaaaaccactaaccctgtggctacagaggaatacggtatcgtggcagataacttgcagcagcaaaacacggctcctcaaattggaactgtcaacagccagggggccttacccggtatggtctggcagaaccgggacgtgtacctgcagggtcccatctgggccaagattcctcacacggacggcaacttccacccgtctccgctgatgggcggctttggcctgaaacatcctccgcctcagatcctgatcaagaacacgcctgtacctgcggatcctccgaccaccttcaaccagtcaaagctgaactctttcatcacgcaatacagcaccggacaggtcagcgtggaaattgaatgggagctgcagaaggaaaacagcaagcgctggaaccccgagatccagtacacctccaactactacaaatctataagtgtggactttgctgttaatacagaaggcgtgtactctgaaccccgccccattggcacccgttacctcacccgtaatctgtaattgcctgttaatcaataaaccggttgattcgtttcagttgaactttggtctctgcgaagggcgaattc

SEQ ID NO: 5 - DNA, 255 bp, Adeno-associated virus 10
ggtaattcctccggaaattggcattgcgattccacatggctgggcgacagagtcatcaccaccagcacccgaacctgggtcctgcccacctacaacaaccacatctacaagcaaatctccagcgagacaggagccaccaacgacaaccactacttcggctacagcaccccctgggggtattttgactttaacagattccactgccacttttcaccacgtgactggcagcgactcatcaacaacaactggggattc

SEQ ID NO: 6 - protein, 738 aa, Adeno-associated virus 10
MAADGYLPDWLEDNLSEGIREWWDLKPGAPKPKANQQKQDDGRGLVLPGYKYLGPFNGLDKGEPVNAADAAALEHDKAYDQQLKAGDNPYLRYNHADAEFQERLQEDTSFGGNLGRAVFQAKKRVLEPLGLVEEAAKTAPGKKRPVEPSPQRSPDSSTGIGKKGQQPAKKRLNFGQTGESESVPDPQPIGEPPAGPSGLGSGTMAAGGGAPMADNNEGADGVGSSSGNWHCDSTWLGDRVITTSTRTWALPTYNNHLYKQISNGTSGGSTNDNTYFGYSTPWGYFDFNRFHCHFSPRDWQRLINNNWGFRPKRLSFKLFNIQVKEVTQNEGTKTIANNLTSTIQVFTDSEYQLPYVLGSAHQGCLPPFPADVFMIPQYGYLTLNNGSQAVGRSSFYCLEYFPSQMLRTGNNFEFSYTFEDVPFHSSYAHSQSLDRLMNPLIDQYLYYLSRTQSTGGTQGTQQLLFSQAGPANMSAQAKNWLPGPCYRQQRVSTTLSQNNNSNFAWTGATKYHLNGRDSLVNPGVAMATHKDDEERFFPSSGVLMFGKQGAGRDNVDYSSVMLTSEEEIKTTNPVATEQYGVVADNLQQANTGPIVGNVNSQGALPGMVWQNRDVYLQGPIWAKIPHTDGNFHPSPLMGGFGLKHPPPQILIKNTPVPADPPTTFSQAKLASFITQYSTGQVSVEIEWELQKENSKRWNPEIQYTSNYYKSTNVDFAVNTEGTYSEPRPIGTRYLTRNL

SEQ ID NO: 7 - protein, 738 aa, Adeno-associated virus 10
MAADGYLPDWLEDNLSEGIREWWDLKPGAPKPKANQQKQDDGRGLVLPGYKYLGPFNGLDKGEPVNAADAAALEHDKAYDQQLKAGDNPYLRYNHADAEFQERLQEDTSFGGNLGRAVFQAKKRVLEPLGLVEEGAKTAPGKKRPVEPSPQRSPDSSTGIGKKGQQPAKKRLNFGQTGDSESVPDPQPIGEPPAGPSGLGSGTMAAGGGAPMADNNEGADGVGSSSGNWHCDSTWLGDRVITTSTRTWALPTYNNHLYKQISNGTSGGSTNDNTYFGYSTPWGYFDFNRFHCHFSPRDWQRLINNNWGFRPKRLNFKLFNIQVKEVTQNEGTKTIANNLTSTIQVFTDSEYQLPYVLGSAHQGCLPPFPADVFMIPQYGYLTLNNGSQAVGRSSFYCLEYFPSQMLRTGNNFEFSYQFEDVPFHSSYAHSQSLDRLMNPLIDQYLYYLSRTQSTGGTAGTQQLLFSQAGPNNMSAQAKNWLPGPCYRQQRVSTTLSQNNNSNFAWTGATKYHLNGRDSLVNPGVAMATHKDDEERFFPSSGVLMFGKQGAGKDNVDYSSVMLTSEEEIKTTNPVATEQYGVVADNLQQQNAAPIVGAVNSQGALPGMVWQNRDVYLQGPIWAKIPHTDGNFHPSPLMGGFGLKHPPPQILIKNTPVPADPPTTFSQAKLASFITQYSTGQVSVEIEWELQKENSKRWNPEIQYTSNYYKSTNVDFAVNTDGTYSEPRPIGTRYLTRNL

SEQ ID NO: 8 - DNA, 258 bp, Adeno-associated virus 11
ggtaattcctccggaaattggcattgcgattccacatggctgggcgacagagtcatcaccaccagcacccgaacctgggccctgccaacctacaacaaccacctctacaaacaaatctccagcgcttcaacgggggccagcaacgacaaccactactttggctacagcaccccctgggggtattttgactttaacagattccactgccacttctcaccacgtgactggcagcgactcatcaacaacaactggggattc

SEQ ID NO: 9 - DNA, 255 bp, Adeno-associated virus 12
ggtaattcctccggaaattggcattgcgattccacatggctgggcgaccgagtcattaccaccagcacccggacttgggccctgcccacctacaacaaccacctctacaagcaaatctccagccaatcgggtgccaccaacgacaaccactacttcggctacagcaccccttgggggtattttgatttcaacagattccactgccatttctcaccacgtgactggcagcgactcatcaacaacaactggggattc

SEQ ID NO: 10 - DNA, 2208 bp, Adeno-associated virus 2
atggctgccgatggttatcttccagattggctcgaggacactctctctgaaggaataagacagtggtggaagctcaaacctggcccaccaccaccaaagcccgcagagcggcataaggacgacagcaggggtcttgtgcttcctgggtacaagtacctcggacccttcaacggactcgacaagggagagccggtcaacgaggcagacgccgcggccctcgagcacgacaaagcctacgaccggcagctcgacagcggagacaacccgtacctcaagtacaaccacgccgacgcggagtttcaggagcgccttaaagaagatacgtcttttgggggcaacctcggacgagcagtcttccaggcgaaaaagagggttcttgaacctctgggcctggttgaggaacctgttaagacggctccgggaaaaaagaggccggtagagcactctcctgtggagccagactcctcctcgggaaccggaaaggcgggccagcagcctgcaagaaaaagattgaattttggtcagactggagacgcagactcagtacctgacccccagcctctcggacagccaccagcagccccctctggtctgggaactaatacgatggctacaggcagtggcgcaccaatggcagacaataacgagggcgccgacggagtgggtaattcctcgggaaattggcattgcgattccacatggatgggcgacagagtcatcaccaccagcacccgaacctgggccctgcccacctacaacaaccacctctacaaacaaatttccagccaatcaggagcctcgaacgacaatcactactttggctacagcaccccttgggggtattttgacttcaacagattccactgccacttttcaccacgtgactggcaaagactcatcaacaacaactggggattccgacccaagagactcaacttcaagctctttaacattcaagtcaaagaggtcacgcagaatgacggtacgacgacgattgccaataaccttaccagcacggttcaggtgtttactgactcggagtaccagctcccgtacgtcctcggctcggcgcatcaaggatgcctcccgccgttcccagcagacgtcttcatggtgccacagtatggatacctcaccctgaacaacgggagtcaggcagtaggacgctcttcattttactgcctggagtactttccttctcagatgctgcgtaccggaaacaactttaccttcagctacacttttgaggacgttcctttccacagcagctacgctcacagccagagtctggaccgtctcatgaatcctctcatcgaccagtacctgtattacttgagcagaacaaacactccaagtggaaccaccacgcagtcaaggcttcagttttctcaggccggagcgagtgacattcgggaccagtctaggaactggcttcctggaccctgttaccgccagcagcgagtatcaaagacatctgcggataacaacaacagtgaatactcgtggactggagctaccaagtaccacctcaatggcagagactctctggtgaatccgggcccggccatggcaagccacaaggacgatgaagaaaagttttttcctcagagcggggttctcatctttgggaagcaaggctcagagaaaacaaatgtggacattgaaaaggtcatgattacagacgaagaggaaatcaggacaaccaatcccgtggctacggagcagtatggttctgtatctaccaacctccagagaggcaacagacaagcagctaccgcagatgtcaacacacaaggcgttcttccaggcatggtctggcaggacagagatgtgtaccttcaggggcccatctgggcaaagattccacacacggacggacattttcacccctctcccctcatgggtggattcggacttaaacaccctcctccacagattctcatcaagaacaccccggtacctgcgaatccttcgaccaccttcagtgcggcaaagtttgcttccttcatcacacagtactccacgggacaggtcagcgtggagatcgagtgggagctgcagaaggaaaacagcaaacgctggaatcccgaaattcagtacacttccaactacaacaagtctgttaatgtggactttactgtggacactaatggcgtgtattcagagcctcgccccattggcaccagatacctgactcgtaatctgtaa

SEQ ID NO: 11 - protein, 735 aa, Adeno-associated virus 2 [sequence omitted]

SEQ ID NO: 12 - protein, 621 aa, Adeno-associated virus 2
MPGFYEIVIKVPSDLDGHLPGISDSFVNWVAEKEWELPPDSDMDLNLIEQAPLTVAEKLQRDFLTEWRRVSKAPEALFFVQFEKGESYFHMHVLVETTGVKSMVLGRFLSQIREKLIQRIYRGIEPTLPNWFAVTKTRNGAGGGNKVVDECYIPNYLLPKTQPELQWAWTNMEQYLSACLNLTERKRLVAQHLTHVSQTQEQNKENQNPNSDAPVIRSKTSARYMELVGWLVDKGITSEKQWIQEDQASYISFNAASNSRSQIKAALDNAGKIMSLTKTAPDYLVGQQPVEDISSNRIYKILELNGYDPQYAASVFLGWATKKFGKRNTIWLFGPATTGKTNIAEAIAHTVPFYGCVNWTNENFPFNDCVDKMVIWWEEGKMTAKVVESAKAILGGSKVRVDQKCKSSAQIDPTPVIVTSNTNMCAVIDGNSTTFEHQQPLQDRMFKFELTRRLDHDFGKVTKQEVKDFFRWAKDHVVEVEHEFYVKKGGAKKRPAPSDADISEPKRVRESVAQPSTSDAEASINYADRYQNKCSRHVGMNLMLFPCRQCERMNQNSNICFTHGQKDCLECFPVSESQPVSVVKKAYQKLCYIHHIMGKVPDACTACDLVNVDLDDCIFEQ

SEQ ID NO: 13 - DNA, 4675 bp, Adeno-associated virus 2
ttggccactccctctctgcgcgctcgctcgctcactgaggccgggcgaccaaaggtcgcccgacgcccgggctttgcccgggcggcctcagtgagcgagcgagcgcgcagagagggagtggccaactccatcactaggggttcctggaggggtggagtcgtgacgtgaattacgtcatagggttagggaggtcctgtattagaggtcacgtgagtgttttgcgacattttgcgacaccatgtggtcacgctgggtatttaagcccgagtgagcacgcagggtctccattttgaagcgggaggtttgaacgcgcagccgccatgccggggttttacgagattgtgattaaggtccccagcgaccttgacgggcatctgcccggcatttctgacagctttgtgaactgggtggccgagaaggaatgggagttgccgccagattctgacatggatctgaatctgattgagcaggcacccctgaccgtggccgagaagctgcagcgcgactttctgacggaatggcgccgtgtgagtaaggccccggaggcccttttctttgtgcaatttgagaagggagagagctacttccacatgcacgtgctcgtggaaaccaccggggtgaaatccatggttttgggacgtttcctgagtcagattcgcgaaaaactgattcagagaatttaccgcgggatcgagccgactttgccaaactggttcgcggtcacaaagaccagaaatggcgccggaggcgggaacaaggtggtggatgagtgctacatccccaattacttgctccccaaaacccagcctgagctccagtgggcgtggactaatatggaacagtatttaagcgcctgtttgaatctcacggagcgtaaacggttggtggcgcagcatctgacgcacgtgtcgcagacgcaggagcagaacaaagagaatcagaatcccaattctgatgcgccggtgatcagatcaaaaacttcagccaggtacatggagctggtcgggtggctcgtggacaaggggattacctcggagaagcagtggatccaggaggaccaggcctcatacatctccttcaatgcggcctccaactcgcggtcccaaatcaaggctgccttggacaatgcgggaaagattatgagcctgactaaaaccgcccccgactacctggtgggccagcagcccgtggaggacatttccagcaatcggatttataaaattttggaactaaacgggtacgatccccaatatgcggcttccgtctttctgggatgggccacgaaaaagttcggcaagaggaacaccatctggctgtttgggcctgcaactaccgggaagaccaacatcgcggaggccatagcccacactgtgcccttctacgggtgcgtaaactggaccaatgagaactttcccttcaacgactgtgtcgacaagatggtgatctggtgggaggaggggaagatgaccgccaaggtcgtggagtcggccaaagccattctcggaggaagcaaggtgcgcgtggaccagaaatgcaagtcctcggcccagatagacccgactcccgtgatcgtcacctccaacaccaacatgtgcgccgtgattgacgggaactcaacgaccttcgaacaccagcagccgttgcaagaccggatgttcaaatttgaactcacccgccgtctggatcatgactttgggaaggtcaccaagcaggaagtcaaagactttttccggtgggcaaaggatcacgtggttgaggtggagcatgaattctacgtcaaaaagggtggagccaagaaaagacccgcccccagtgacgcagatataagtgagcccaaacgggtgcgcgagtcagttgcgcagccatcgacgtcagacgcggaagcttcgatcaactacgcagacaggtaccaaaacaaatgttctcgtcacgtgggcatgaatctgatgctgtttccctgcagacaatgcgagagaatgaatcagaattcaaatatctgcttcactcacggacagaaagactgtttagagtgctttcccgtgtcagaatctcaacccgtttctgtcgtcaaaaaggcgtatcagaaactgtgctacattcatcatatcatgggaaaggtgccagacgcttgcactgcctgcgatctggtcaatgtggatttggatgactgcatctttgaacaataaatgatttaaatcaggtatggctgccgatggttatcttccagattggctcgaggacactctctctgaaggaataagacagtggtggaagctcaaacctggcccaccaccaccaaagcccgcagagcggcataaggacgacagcaggggtcttgtgcttcctgggtacaagtacctcggacccttcaacggactcgacaagggagagccggtcaacgaggcagacgccgcggccctcgagcacgtacaaagcctacgaccggcagctcgacagcggagacaacccgtacctcaagtacaaccacgccgacgcggagtttcaggagcgccttaaagaagatacgtcttttgggggcaacctcggacgagcagtcttccaggcgaaaaagagggttcttgaacctctgggcctggttgaggaacctgttaagacggctccgggaaaaaagaggccggtagagcactctcctgtggagccagactcctcctcgggaaccggaaaggcgggccagcagcctgcaagaaaaagattgaattttggtcagactggagacgcagactcagtacctgacccccagcctctcggacagccaccagcagccccctctggtctgggaactaatacgatggctacaggcagtggcgcaccaatggcagacaataacgagggcgccgacggagtgggtaattcctccggaaattggcattgcgattccacatggatgggcgacagagtcatcaccaccagcacccgaacctgggccctgcccacctacaacaaccacctctacaaacaaatttccagccaatcaggagcctcgaacgacaatcactactttggctacagcaccccttgggggtattttgacttcaacagattccactgccacttttcaccacgtgactggcaaagactcatcaacaacaactggggattccgacccaagagactcaacttcaagctctttaacattcaagtcaaagaggtcacgcagaatgacggtacgacgacgattgccaataaccttaccagcacggttcaggtgtttactgactcggagtaccagctcccgtacgtcctcggctcggcgcatcaaggatgcctcccgccgttcccagcagacgtcttcatggtgccacagtatggatacctcaccctgaacaacgggagtcaggcagtaggacgctcttcattttactgcctggagtactttccttctcagatgctgcgtaccggaaacaactttaccttcagctacacttttgaggacgttcctttccacagcagctacgctcacagccagagtctggaccgtctcatgaatcctctcatcgaccagtacctgtattacttgagcagaacaaacactccaagtggaaccaccacgcagtcaaggcttcagttttctcaggccggagcgagtgacattcgggaccagtctaggaactggcttcctggaccctgttaccgccagcagcgagtatcaaagacatctgcggataacaacaacagtgaatactcgtggactggagctaccaagtaccacctcaatggcagagactctctggtgaatccggccatggcaagccacaaggacgatgaagaaaagttttttcctcagagcggggttctcatctttgggaagcaaggctcagagaaaacaaatgtgaacattgaaaaggtcatgattacagacgaagaggaaatcggaacaaccaatcccgtggctacggagcagtatggttctgtatctaccaacctccagagaggcaacagacaagcagctaccgcagatgtcaacacacaaggcgttcttccaggcatggtctggcaggacagagatgtgtaccttcaggggcccatctgggcaaagattccacacacggacggacattttcacccctctcccctcatgggtggattcggacttaaacaccctcctccacagattctcatcaagaacaccccggtacctgcgaatccttcgaccaccttcagtgcggcaaagtttgcttccttcatcacacagtactccacgggacacggtcagcgtggagatcgagtgggagctgcagaaggaaaacagcaaacgctggaatcccgaaattcagtacacttccaactacaacaagtctgttaatcgtggacttaccgtggatactaatggcgtgtattcagagcctcgccccattggcaccagatacctgactcgtaatctgtaattgcttgttaatcaataaaccgtttaattcgtttcagttgaactttggtctctgcgtatttctttcttatctagtttccatggctacgtagataagtagcatggcgggttaatcattaactacaaggaacccctagtgatggagttggccactccctctctgcgcgctcgctcgctcactgaggccgggcgaccaaaggtcgcccgacgcccgggctttgcccgggcggcctcagtgagcgagcgagcgcgcagagagggagtggccaa

SEQ ID NO: 14 - DNA, 4679 bp, Adeno-associated virus 2
ttggccactccctctctgcgcgctcgctcgctcactgaggccgggcgaccaaaggtcgcccgacgcccgggctttgcccgggcggcctcagtgagcgagcgagcgcgcagagagggagtggccaactccatcactaggggttcctggaggggtggagtcgtgacgtgaattacgtcatagggttagggaggtcctgtattagaggtcacgtgagtgttttgcgacattttgcgacaccatgtggtcacgctgggtatttaagcccgagtgagcacgcagggtctccattttgaagcgggaggtttgaacgcgcagccgccatgccggggttttacgagattgtgattaaggtccccagcgaccttgacgggcatctgcccggcatttctgacagctttgtgaactgggtggccgagaaggaatgggagttgccgccagattctgacatggatctgaatctgattgagcaggcacccctgaccgtggccgagaagctgcagcgcgactttctgacggaatggcgccgtgtgagtaaggccccggaggcccttttctttgtgcaatttgagaagggagagagctacttccacatgcacgtgctcgtggaaaccaccggggtgaaatccatggttttgggacgtttcctgagtcagattcgcgaaaaactgattcagagaatttaccgcgggatcgagccgactttgccaaactggttcgcggtcacaaagaccagaaatggcgccggaggcgggaacaaggtggtggatgagtgctacatccccaattacttgctccccaaaacccagcctgagctccagtgggcgtggactaatatggaacagtatttaagcgcctgtttgaatctcacggagcgtaaacggttggtggcgcagcatctgacgcacgtgtcgcagacgcaggagcagaacaaagagaatcagaatcccaattctgatgcgccggtgatcagatcaaaaacttcagccaggtacatggagctggtcgggtggctcgtggacaaggggattacctcggagaagcagtggatccaggaggaccaggcctcatacatctccttcaatgcggcctccaactcgcggtcccaaatcaaggctgccttggacaatgcgggaaagattatgagcctgactaaaaccgcccccgactacctggtgggccagcagcccgtggaggacatttccagcaatcggatttataaaattttggaactaaacgggtacgatccccaatatgcggcttccgtctttctgggatgggccacgaaaaagttcggcaagaggaacaccatctggctgtttgggcctgcaactaccgggaagaccaacatcgcggaggccatagcccacactgtgcccttctacgggtgcgtaaactggaccaatgagaactttcccttcaacgactgtgtcgacaagatggtgatctggtgggaggaggggaagatgaccgccaaggtcgtggagtcggccaaagccattctcggaggaagcaaggtgcgcgtggaccagaaatgcaagtcctcggcccagatagacccgactcccgtgatcgtcacctccaacaccaacatgtgcgccgtgattgacgggaactcaacgaccttcgaacaccagcagccgttgcaagaccggatgttcaaatttgaactcacccgccgtctggatcatgactttgggaaggtcaccaagcaggaagtcaaagactttttccggtgggcaaaggatcacgtggttgaggtggagcatgaattctacgtcaaaaagggtggagccaagaaaagacccgcccccagtgacgcagatataagtgagcccaaacgggtgcgcgagtcagttgcgcagccatcgacgtcagacgcggaagcttcgatcaactacgcagacaggtaccaaaacaaatgttctcgtcacgtgggcatgaatctgatgctgtttccctgcagacaatgcgagagaatgaatcagaattcaaatatctgcttcactcacggacagaaagactgtttagagtgctttcccgtgtcagaatctcaacccgtttctgtcgtcaaaaaggcgtatcagaaactgtgctacattcatcatatcatgggaaaggtgccagacgcttgcactgcctgcgatctggtcaatgtggatttggatgactgcatctttgaacaataaatgatttaaatcaggtatggctgccgatggttatcttccagattggctcgaggacactctctctgaaggaataagacagtggtggaagctcaaacctggcccaccaccaccaaagcccgcagagcggcataaggacgacagcaggggtcttgtgcttcctgggtacaagtacctcggacccttcaacggactcgacaagggagagccggtcaacgaggcagacgccgcggccctcgagcacgacaaagcctacgaccggcagctcgacagcggagacaacccgtacctcaagtacaaccacgccgacgcggagtttcaggagcgccttaaagaagatacgtcttttgggggcaacctcggacgagcagtcttccaggcgaaaaagagggttcttgaacctctgggcctggttgaggaacctgttaagacggctccgggaaaaaagaggccggtagagcactctcctgtggagccagactcctcctcgggaaccggaaaggcgggccagcagcctgcaagaaaaagattgaattttggtcagactggagacgcagactcagtacctgacccccagcctctcggacagccaccagcagccccctctggtctgggaactaatacgatggctacaggcagtggcgcaccaatggcagacaataacgagggcgccgacggagtgggtaattcctccggaaattggcattgcgattccacatggatgggcgacagagtcatcaccaccagcacccgaacctgggccctgcccacctacaacaaccacctctacaaacaaatttccagccaatcaggagcctcgaacgacaatcactactttggctacagcaccccttgggggtattttgacttcaacagattccactgccacttttcaccacgtgactggcaaagactcatcaacaacaactggggattccgacccaagagactcaacttcaagctctttaacattcaagtcaaagaggtcacgcagaatgacggtacgacgacgattgccaataaccttaccagcacggttcaggtgtttactgactcggagtaccagctcccgtacgtcctcggctcggcgcatcaaggatgcctcccgccgttcccagcagacgtcttcatggtgccacagtatggatacctcaccctgaacaacgggagtcaggcagtaggacgctcttcattttactgcctggagtactttccttctcagatgctgcgtaccggaaacaactttaccttcagctacacttttgaggacgttcctttccacagcagctacgctcacagccagagtctggaccgtctcatgaatcctctcatcgaccagtacctgtattacttgagcagaacaaacactccaagtggaaccaccacgcagtcaaggcttcagttttctcaggccggagcgagtgacattcgggaccagtctaggaactggcttcctggaccctgttaccgccagcagcgagtatcaaagacatctgcggataacaacaacagtgaatactcgtggactggagctaccaagtaccacctcaatggcagagactctctggtgaatccgggcccggccatggcaagccacaaggacgatgaagaaaagttttttcctcagagcggggttctcatctttgggaagcaaggctcagagaaaacaaatgtggacattgaaaaggtcatgattacagacgaagaggaaatcaggacaaccaatcccgtggctacggagcagtatggttctgtatctaccaacctccagagaggcaacagacaagcagctaccgcagatgtcaacacacaaggcgttcttccaggcatggtctggcaggacagagatgtgtaccttcaggggcccatctgggcaaagattccacacacggacggacattttcacccctctcccctcatgggtggattcggacttaaacaccctcctccacagattctcatcaagaacaccccggtacctgcgaatccttcgaccaccttcagtgcggcaaagtttgcttccttcatcacacagtactccacgggacaggtcagcgtggagatcgagtgggagctgcagaaggaaaacagcaaacgctggaatcccgaaattcagtacacttccaactacaacaagtctgttaatgtggactttactgtggacactaatggcgtgtattcagagcctcgccccattggcaccagatacctgactcgtaatctgtaattgcttgttaatcaataaaccgtttaattcgtttcagttgaactttggtctctgcgtatttctttcttatctagtttccatggctacgtagataagtagcatggcgggttaatcattaactacaaggaacccctagtgatggagttggccactccctctctgcgcgctcgctcgctcactgaggccgggcgaccaaaggtcgcccgacgcccgggctttgcccgggcggcctcagtgagcgagcgagcgcgcagagagggagtggccaa

SEQ ID NO: 15 - protein, 725 aa, Adeno-associated virus 5
MAADGYLPDWLEDTLSEGIRQWWKLKPGPPPPKPAERHKDDSRGLVLPGYKYLGPFNGLDKGEPVNEADAAALEHDKAYDRQLDSGDNPYLKYNHADAEFQERLKEDTSFGGNLGRAVFQAKKRVLEPFGLVEEGAKTAPTGKRIDDHFPKRKKARTEEDSKPSTSSDAEAGPSGSQQLQIPAQPASSLGADTMSAGGGGPLGDNNQGADGVGNASGDWHCDSTWMGDRVVTKSTRTWVLPSYNNHQYREIKSGSVDGSNANAYFGYSTPWGYFDFNRFHSHWSPRDWQRLINNYWGFRPRSLRVKIFNIQVKEVTVQDSTTTIANNLTSTVQVFTDDDYQLPYVVGNGTEGCLPAFPPQVFTLPQYGYATLNRDNTENPTERSSFFCLEYFPSKMLRTGNNFEFTYNFEEVPFHSSFAPSQNLFKLANPLVDQYLYRFVSTNNTGGVQFNKNLAGRYANTYKNWFPGPMGRTQGWNLGSGVNRASVSAFATTNRMELEGASYQVPPQPNGMTNNLQGSNTYALENTMIFNSQPANPGTTATYLEGNMLITSESETQPVNRVAYNVGGQMATNNQSSTTAPTTGTYNLQEIVPGSVWMERDVYLQGPIWAKIPETGAHFHPSPAMGGFGLKHPPPMMLIKNTPVPGNITSFSDVPVSSFITQYSTGQVTVEMEWELKKENSKRWNPEIQYTNNYNDPQFVDFAPDSTGEYRTTRPIGTRYLTRPL

SEQ ID NO: 16 - protein, 644 aa, Adeno-associated virus
  MOD_RES (434)..(434): Xaa = any amino acid
KAYDQQLKAGDNPYLRYNHADAEFQERLQEDTSFGGNLGRAVFQAKKRVLEPLGLVETPAKTAPGKKRPVDSPDSTSGIGKKGQQPAKKRLNFGQTGDSESVPDPQPIGEPPAGPSGLGSGTMAAGGGAPMADNNEGADGVGNASGNWHCDSTWLGDRVITTSTRTWALPTYNNHLYKQISSQSAGSTNDNVYFGYSTPWGYFDFNRFHCHFSPRDWQRLINNNWGFRPKKLNFKLFNIQVKEVTTNDGVTTIANNLTSTVQVFSDSEYQLPYVLGSAHQGCLPPFPADVFMIPQYGYLTLNNGSQSVGRSSFYCLEYFPSQMLRTGNNFTFSYTFEDVPFHSSYAHSQSLDRLMNPLIDQYLYYLARTQSNAGGTAGNRELQFYQGGPTTMAEQAKNWLPGPCFRQQRVSKTLDQNNNSNFAWTGATKYHLNXRNSLVNPGVAMATHKDDEERFFPSSGVLIFGKTGAANKTTLENVLMTNEEEIRPTNPVATEEYGIVSSNLQAASTAAQTQVVNNQGALPGMVWQNRDVYLQGPIWAKIPHTDGNFHPSPLMGGFGLKHPPPQILIKNTPVPANPPEVFTPAKFASFITQYSTGQVSVEIEWELQKENSKRWNPEIQYTSNFDKQTGVDFAVDSQGVYSEP

SEQ ID NO: 17 - DNA, 1933 bp, Adeno-associated virus
caaggcctacgaccagcagctcaaagcgggtgacaatccgtacctgcggtataaccacgccgacgccgagtttcaggagtgtcttcaagaagatacgtcttttgggggcaacctcgggcgagcagtcttccaggccaaaaagcgggttctcgaacctcttggtctggttgagacgccagctaagacggcacctggaaagaagcgaccggtagactcgccagactccacctcgggcatcggcaagaaaggccagcagcccgcgaaaaagagactcaactttgggcagactggcgactcagagtcagtccccgaccctcaaccaatcggagaaccaccagcaggcccctctggtctgggatctggtacaatggttgcaggcggtggcgcaccaatggctgacaataacgagggcgccgacggagtgggtaatgcctcaggaaattggcattgcgattccacatggctgggcgacagagtcatcaccaccagcacccgaacctgggccctgcccacctacaacaaccacctctacaagcaaatctccagtcagtcagcagggagcaccaacgataacgtctatttcggctacagcaccccctgggggtattttgacttcaacagattccattgccacttctcaccacgtgactggcagcgacttatcaacaacaactggggattccggcccaagaagctcaacttcaagctcttcaacatccaggtcaaggaggtcacgacgaatgacggtgtcacaaccatcgctaataaccttaccagcacggttcaggtcttttcggactcggaatatcaactgccgtacgtcctcggctccgcgcaccagggctgcctgcctccgttcccggcagacgtgttcatgattccgcagtacggatacctgactctgaacaatggcagccaatcggtaggccgttcctccttctactgcctggagtactttccttctcagatgctgagaacgggcaacaacttcacctttagctacaccttcgaggacgtgcctttccacagcagctacgcgcacagccagagtctggaccggctgatgaatcccctcatcgaccagtacctgtactacttggccagaacacagagcaacgcaggaggtactgctggcaatcgggaactgcagttttatcagggcggacctaccaccatggccgaacaagcaaagaactggctgcccggaccttgcttccggcaacagagagtatccaagacgctggatcaaaataacaacagcaactttgcctggactggtgccacaaaataccatttaaatggaagaaattcattggttaatcccggtgtcgccatggcaacccacaaggacgacgaggaacgcttctccccttcgagcggagttctaatttttggcaaaactggagcagctaataaaactacattagaaaacgtgctcatgacaaatgaagaagaaattcgtcctaccaacccggtagctaccgaggaatacgggattgtaagcagcaacttgcaggcggctagcaccgcagcccagacacaagttgttaacaaccagggagccttacctggcatggtctggcagaaccgggacgtgtacctgcaaggtcccatttgggccaagattcctcacacggacggcaactttcacccgtctcctctaatgggtggctttggactgaaacacccgcctccccagatcctgatcaaaaacacgccggtacctgctaatcctccagaagtgtttactcctgccaagtttgcttccttcatcacgcagtacagcaccgggcaagtcagcgttgagatcgagtgggagctgcagaaagagaacagcaagcgctggaacccagagattcagtacacctccaactttgacaaacagactggagtggactttgctgttgacagccagggtgtttactctgagcct

SEQ ID NO: 18 - protein, 644 aa, Adeno-associated virus
KAYDQQLKAGDNPYLRYNHADAEFQECLQEDTSFGGNLGRAVFQAKKRVLEPLGLVETPAKTAPGKKRPVDSPDSTSGIGKKGQQPAKKRLNFGQTGDSESVPDPQPIGEPPAGPSGLGSGTMVAGGGAPMADNNEGADGVGNASGNWHCDSTWLGDRVITTSTRTWALPTYNNHLYKQISSQSAGSTNDNVYFGYSTPWGYFDFNRFHCHFSPRDWQRLINNNWGFRPKKLNFKLFNIQVKEVTTNDGVTTIANNLTSTVQVFSDSEYQLPYVLGSAHQGCLPPFPADVFMIPQYGYLTLNNGSQSVGRSSFYCLEYFPSQMLRTGNNFTFSYTFEDVPFHSSYAHSQSLDRLMNPLIDQYLYYLARTQSNAGGTAGNRELQFYQGGPTTMAEQAKNWLPGPCFRQQRVSKTLDQNNNSNFAWTGATKYHLNGRNSLVNPGVAMATHKDDEERFSPSSGVLIFGKTGAANKTTLENVLMTNEEEIRPTNPVATEEYGIVSSNLQAASTAAQTQVVNNQGALPGMVWQNRDVYLQGPIWAKIPHTDGNFHPSPLMGGFGLKHPPPQILIKNTPVPANPPEVFTPAKFASFITQYSTGQVSVEIEWELQKENSKRWNPEIQYTSNFDKQTGVDFAVDSQGVYSEP

SEQ ID NO: 19 - DNA, 1933 bp, Adeno-associated virus
caaggcctacgaccagcagctcaaagcgggtgacaatccgtacctgcggtataaccacgccgacgccgagtttcaggagcgtcttcaagaagatacgtcttttgggggcaacctcgggcgagcagtcttccaggccaaaaagcgggttctcgaacctcttggtctggttgagacgccagctaagacggcacctggaaagaagcgaccggtagactcgccagactccacctcgggcatcggcaagaaaggccagcagcccgcgaaaaagagactcaactttgggcagactggcgactcagagccagtccccgaccctcaaccaatcggagaaccaccagcaggcccctctggtctgggatctggtacaatggctgcaggcggtggcgcaccaatggctgacaataacgagggcgccgacggagtgggtaatgcctcaggaaattggcattgcgattccacacggctgggcgacagagtcatcaccaccagcacccgaacctgggccctgcccacctacaacaaccacctctacaagcaaatctccagtcagtcagcagggagcaccaacgataacgtctatttcggctacagcaccccctgggggtattttgacttcaacagattccattgccacttctcaccacgtgactggcagcgacttatcaacaacaactggggattccggcccaagaagctcaacttcaagctcttcaacatccaggtcaaggaggtcacgacgaatgacggcgtcacaaccatcgctaataaccttaccagcacggttcaggtcttttcggactcggaatatcaactgccgtacgtcctcggctccgcgcaccagggctgcctgcctccgttcccggcagacgtgttcatgattccgcagtacggatacctgactctgaacaatggcagccaatcggtaggccgttcctccttctactgcctggagtactttccttctcagatgctgagaacgggcaacaacttcacctttagctacaccttcgaggacgtgcctttccacagcagctacgcgcacagccagagtctgggccggctgatgaatcccctcatcgaccagtacctgtactacttggccagaacacagagcaacgcaggaggtactgctggcaatcgggaactgcagttttatcagggcggacctaccaccatggccgaacaagcaaagaactggctgcccggaccttgcttccggcaacagagagtatccaagacgctggatcaaaataacaacagcaactttgcctggactggtgccacaaaataccatttaaatggaagaaattcattggttaatcccggtgtcgccatggcaacccacaaggacgacgaggaacgcttcttcccttcgagcggagttctaatttttggcaaaactggagcagctaataaaactacattagaaaacgtgctcatgacaaatgaagaagaaattcgtcctaccaacccggtagctaccgaggaatacgggattgtaagcagcaacttgcaggcggctagcaccgcagcccagacacaagttgttaacaaccagggagccttacctggcatggtctggcagaaccgggacgtgtacctgcaaggtcccatttgggccaagattcctcacacggacggcaactttcacccgtctcctctaatgggtggctttggactgaaacacccgcctccccagatcctgatcaaaaacacaccggtacctgctaatcctccagaagtgtttactcctgccaagtttgcttccttcatcacgcagtacagcaccgggcaagtcagcgttgagatcgaatgggagctgcagaaagagaacagcaagcgctggaacccagagattcagtacacctccaactttgacaaacagactggagtggactttgctgttgacagccagggtgtttactctgagcct

SEQ ID NO: 20 - protein, 644 aa, Adeno-associated virus
KAYDQQLKAGDNPYLRYNHADAEFQERLQEDTSFGGNLGRAVFQAKKRVLEPLGLVETPAKTAPGKKRPVDSPDSTSGIGKKGQQPAKKRLNFGQTGDSEPVPDPQPIGEPPAGPSGLGSGTMAAGGGAPMADNNEGADGVGNASGNWHCDSTRLGDRVITTSTRTWALPTYNNHLYKQISSQSAGSTNDNVYFGYSTPWGYFDFNRFHCHFSPRDWQRLINNNWGFRPKKLNFKLFNIQVKEVTTNDGVTTIANNLTSTVQVFSDSEYQLPYVLGSAHQGCLPPFPADVFMIPQYGYLTLNNGSQSVGRSSFYCLEYFPSQMLRTGNNFTFSYTFEDVPFHSSYAHSQSLGRLMNPLIDQYLYYLARTQSNAGGTAGNRELQFYQGGPTTMAEQAKNWLPGPCFRQQRVSKTLDQNNNSNFAWTGATKYHLNGRNSLVNPGVAMATHKDDEERFFPSSGVLIFGKTGAANKTTLENVLMTNEEEIRPTNPVATEEYGIVSSNLQAASTAAQTQVVNNQGALPGMVWQNRDVYLQGPIWAKIPHTDGNFHPSPLMGGFGLKHPPPQILIKNTPVPANPPEVFTPAKFASFITQYSTGQVSVEIEWELQKENSKRWNPEIQYTSNFDKQTGVDFAVDSQGVYSEP

SEQ ID NO: 21 - DNA, 1933 bp, Adeno-associated virus; identical to SEQ ID NO: 19

SEQ ID NO: 22 - protein, 644 aa, Adeno-associated virus; identical to SEQ ID NO: 20

SEQ ID NO: 23 - DNA, 1933 bp, Adeno-associated virus
caaggcctacgaccagcagctcaaagcgggtgacaatccgtacctgcggtataaccacgccgacgccgagtttcaggagcgtcttcaagaagatacgtcttttgggggcaacctcgggcgagcagtcttccaggccaaaaagcgggttctcgaacctcttggtctggttgagacgccagctaagacggcacctggaaagaagcgaccggtagactcgccagactccacctcgggcatcggcaagaaaggccagcagcccgcgaaaaagagactcaactttgggcagactggcgactcagagtcagtccccgaccctcaaccaatcggagaaccaccagcaggcccctctggtctgggatctggtacaatggctgcaggcggtggcgcaccaatggctgacaatagcgagggcgccgacggagtgggtaatgcctcaggaaattggcattgcgattccacatggctgggcgacagagtcatcaccaccagcacccgaacctgggccctgcccacctacaacaaccacctctacaagcaaatctccagtcagtcagcagggagcaccaacgataacgtctatttcggctacagcaccccctgggggtattttgacttcaacagattccattgccacttctcaccacgtgactggcagcgacttatcaacaacaactggggattccggcccaagaagctcaacttcaagctcttcaacatccaggtcaaggaggtcacgacgaatgacggtgtcacaaccatcgctaataaccttaccagcacggttcaggtcttttcggactcggaatatcaactgccgtacgtcctcggctccgcgcaccagggctgcctgcctccgttcccggcagacgtgttcatgattccgcagtacggatacctgactctgaacaatggcagccaatcggtaggccgttcctccttctactgcctggagtactttccttctcagatgctgagaacgggcaacaacttcacctttagctacaccttcgaggacgtgcctttccacagcagctacgcgcacagccagagtctggaccggctgatgaatcccctcatcgaccagtacctgtactacttggccagaacacagagcaacgcaggaggtactgctggcaatcgggaactgcagttttatcagggcggacctaccaccatggccgaacaagcaaagaactggctgcccggaccttgcttccggcaacagagagtatccaagacgctggatcaaaataacaacagcaactttgcctggactggtgccacaaaataccatttaaatggaagaaattcattggttaatcccggtgtcgccatggcaacccacaaggacgacgaggaacgcttcttcccttcgagcggagttctaatttttggcaaaactggagcagctaataaaactacattagaaaacgtgctcatgacaaatgaagaagaaattcgtcctaccaacccggtagctaccgaggaatacgggattgtaagcagcaacttgcaggcggctagcaccgcagcccagacacaagttgttaacaaccagggagccttacctggcatggtctggcagaaccgggacgtgtacctgcaaggtcccatttgggccaagattcctcacacggacggcaactttcacccgtctcctctaatgggtggctttggactgaaacacccgcctccccagatcctgatcaaaaacacaccggtacctgctaatcctccagaagtgtttactcctgccaagcttgcttccttcatcacgcagtacagcaccgggcaagtcagcgttgagatcgagtgggagctgcagaaagagaacagcaagcgctggaacccagagattcagtacacctccaactttgacaaacagactggagtggactttgctgttgacagccagggtgtttactctgagcct

SEQ ID NO: 24 - protein, 644 aa, Adeno-associated virus
KAYDQQLKAGDNPYLRYNHADAEFQERLQEDTSFGGNLGRAVFQAKKRVLEPLGLVETPAKTAPGKKRPVDSPDSTSGIGKKGQQPAKKRLNFGQTGDSESVPDPQPIGEPPAGPSGLGSGTMAAGGGAPMADNSEGADGVGNASGNWHCDSTWLGDRVITTSTRTWALPTYNNHLYKQISSQSAGSTNDNVYFGYSTPWGYFDFNRFHCHFSPRDWQRLINNNWGFRPKKLNFKLFNIQVKEVTTNDGVTTIANNLTSTVQVFSDSEYQLPYVLGSAHQGCLPPFPADVFMIPQYGYLTLNNGSQSVGRSSFYCLEYFPSQMLRTGNNFTFSYTFEDVPFHSSYAHSQSLDRLMNPLIDQYLYYLARTQSNAGGTAGNRELQFYQGGPTTMAEQAKNWLPGPCFRQQRVSKTLDQNNNSNFAWTGATKYHLNGRNSLVNPGVAMATHKDDEERFFPSSGVLIFGKTGAANKTTLENVLMTNEEEIRPTNPVATEEYGIVSSNLQAASTAAQTQVVNNQGALPGMVWQNRDVYLQGPIWAKIPHTDGNFHPSPLMGGFGLKHPPPQILIKNTPVPANPPEVFTPAKLASFITQYSTGQVSVEIEWELQKENSKRWNPEIQYTSNFDKQTGVDFAVDSQGVYSEP

SEQ ID NO: 25 - DNA, 1933 bp, Adeno-associated virus
caaggcctacgaccagcagctcaaagcgggtgacaatccgtacctgcggtataaccacgccgacgccgagtttcaggagcgtcttcaagaagatacgtcttttgggggcaacctcgggcgagcagtcttccaggccaaaaagcgggttctcgaacctcttggtctggttgagacgccagctaagacggcacctggaaagaagcgaccggtagactcgccagactccacctcgggcatcggcaagaaaggccagcagcccgcgaaaaagagactcaactttgggcagactggcgactcagagtcagtccccgaccctcaaccaatcggagaaccaccagcaggcccctctggtctgggatctggtacaatggctgcaggcggtggcgcaccaatggctgacaataacgagggcgccgacggagtgggtaatgcctcaggaaattggcattgcgattccacatggctgggcgacagagtcatcaccaccagcacccgaacctgggccctgcccacctacaacaaccacctctacaagcaaatctccagtcagtcagcagggagcaccaacgataacgtctatttcggctacagcaccccctgggggtattttgacttcaacagattccattgccacttctcaccacgtgactggcagcgacttatcaacaacaactggggattccggcccaagaagctcaacttcaagctcttcaacatccaggtcaaggaggtcacgacgaatgacggcgtcacaaccatcgctaataaccttaccagcacggttcaggtcttttcggacccggaatatcaactgccgtacgtcctcggctccgcgcaccagggctgcctgcctccgttcccggcagacgtgttcatgattccgcagtacggatacctgactctgaacaatggcagccaatcggtaggccgttcctccttctactgcctggagtactttccttctcagatgctgagaacgggcaacaacttcacctttagctacaccttcgaggacgtgcctttccacagcagctacgcgcacagccagagtctggaccggctgatgaatcccctcatcgaccagtacctgtactacttggccagaacacagagcaacgcaggaggtactgctggcaatcgggaactgcagttttatcagggcggacctaccaccatggccgaacaagcaaagaactggctgcccggaccttgcttccggcaacagagagtatccaagacgctggatcaaaataacaacagcaactttgcctggactggtgccacaaaataccatttaaatggaagaaattcattggttaatcccggtgtcgccatggcaacccacaaggacgacgaggaacgcttcttcccttcgagcggagttctaatttttggcaaaactggagcagctaataaaactacattagaaaacgtgctcatgacaaatgaagaagaaattcgtcctaccaacccggtagctaccgaggaatacgggattgtaagcagcaacttgcaggcggctagcaccgcagcccagacacaagttgttaacaaccagggagccttacctggcatggtctggcagaaccgggacgtgtacctgcaaggtcccatttgggccaagattcctcacacggacggcaactttcacccgtctcctctaatgggtggctttggactgaaacacccgcctccccagatcctgatcaaaaacacaccggtacctgctaatcctccagaagtgtttactcctgccaagattgcttccttcatcacgcagtacagcaccgggcaagtcagcgttgagatcgagtgggagctgcagaaagagaacagcaagcgctggaacccagagattcagtacacctccaactttgacaaacagactggagtggactttgctgttgacagccagggtgtttactctgagcct

SEQ ID NO: 26 - protein, 644 aa, Adeno-associated virus
KAYDQQLKAGDNPYLRYNHADAEFQERLQEDTSFGGNLGRAVFQAKKRVLEPLGLVETPAKTAPGKKRPVDSPDSTSGIGKKGQQPAKKRLNFGQTGDSESVPDPQPIGEPPAGPSGLGSGTMAAGGGAPMADNNEGADGVGNASGNWHCDSTWLGDRVITTSTRTWALPTYNNHLYKQISSQSAGSTNDNVYFGYSTPWGYFDFNRFHCHFSPRDWQRLINNNWGFRPKKLNFKLFNIQVKEVTTNDGVTTIANNLTSTVQVFSDPEYQLPYVLGSAHQGCLPPFPADVFMIPQYGYLTLNNGSQSVGRSSFYCLEYFPSQMLRTGNNFTFSYTFEDVPFHSSYAHSQSLDRLMNPLIDQYLYYLARTQSNAGGTAGNRELQFYQGGPTTMAEQAKNWLPGPCFRQQRVSKTLDQNNNSNFAWTGATKYHLNGRNSLVNPGVAMATHKDDEERFFPSSGVLIFGKTGAANKTTLENVLMTNEEEIRPTNPVATEEYGIVSSNLQAASTAAQTQVVNNQGALPGMVWQNRDVYLQGPIWAKIPHTDGNFHPSPLMGGFGLKHPPPQILIKNTPVPANPPEVFTPAKIASFITQYSTGQVSVEIEWELQKENSKRWNPEIQYTSNFDKQTGVDFAVDSQGVYSEP

SEQ ID NO: 27 - protein, 738 aa, Adeno-associated virus
MAADGYLPDWLEDNLSEGIREWWALKPGAPKPKANQQKQDDGRGLVLPGYKYLGPFNGLDKGEPVNAADAAALEHDKAYDQQLKAGDNPYLRYNHADAEFQERLQEDTSFGGNLGRAVFQAKKRVLEPLGLVEEGAKTAPGKKRPVEPSPQRSPDSTTGIGKKGQQPAKKRLNFGQTGDSESVPDPQPIGEPPAGPSGLGSGTMAAGGGAPMADNNEGADGVGSSSGNWHCDSTWLGDRVITTSTRTWALPTYNNHLYKQISNGTSGGSTNDNTYFGYSTPWGYFDFNRFHCHFSPRDWQRLINNNWGFRPKRLNFKLFNIQVKEVTQNEGTKTIANNLTSTIQVFTDSEYQLPYVLGSARQGCLPPFPADVFMIPQYGYLTLNNGSQAVGRSSFYCLEYFPSQMLRTGNNFEFSYQFEDVPFHSSYAHSQSLDRLMNPLIDQYLYYLSRTQSTGGTAGTQQLLFSQAGPNNMSAQAKNWLPGPCYRQQRVSTTLSQNNNSNFAWTGATKYHLNGRDSLVNPGVAMATHKDDEERFFPSSGVLMFGKQGAGKGNVDYSSVMLTSEEEIKTTNPVATEQYGVVADNLQQQNAAPIVGAVNSQGALPGMVWQNRDVYLQGPIWAKIPHTDGNFHPSPLMGGFGLKHPPPQILIKNTPVPADPPTTFSQAKLASFITQYSTGQVSVEIEWELQKENSKRWNPEIQYTSNYYKSTNVDFAVNTDGTYSEPRPIGTRYLTRNL

SEQ ID NO: 28 - DNA, 3121 bp, Adeno-associated virus
gaattcgcccttctacggctgcgtcaactggaccaatgagaactttcccttcaacgactgtgtcgacaagatggtgatctggtgggaggaggggaagatgaccgccaaggtcgtggagtcggccaaagccattctcggaggaagcaaggtgcgcgtggaccagaaatgcaagtcctcggcccagatagacccgactcccgtgatcgtcacctccaacaccaacatgtgcgccgtgattgacgggaactcaacgaccttcgaacaccagcagccgttgcaagaccggatgttcaaatttgaactcacccgccgtctggatcatgactttgggaaggtcaccaagcaggaagtcaaagactttttccggtgggcaaaggatcacgtggttgaggtggagcacgaattctacgtcaaaaagggtggagccaagaaaagacccgcccccagtgacgcagatataagtgagcccaaacgggtgcgcgagtcagttgcgcagccatcgacgtcagacgcggaagcttcgatcaactacgcagacaggtaccaaaacaaatgttctcgtcacgcgggcatgaatctgatgctgtttccctgcagacaatgcgagagaatgaatcagaattcaaatatctgcttcactcacggacagaaagactgtttagagtgctttcccgtgtcagaatctcaacccgtttctgtcgtcaaaaaggcgtatcagaaactgtgctacattcatcatatcatgggaaaggtgccagacgcttgcactgcctgcgatctggtcgatgtggatttggatgactgcatctttgaacaataaatgatttaaatcaggtatggctgccgatggttatcttccagattggctcgaggacaacctctctgagggcattcgcgagtggtgggcgctgaaacctggagccccgaagcccaaagccaaccagcaaaagcaggacggcggccggggtctggtgcttcctggctacaagtacctcggacccttcaacggactcgacaagggggagcccgtcaacgcggcggacgcagcggccctcgagcacgacaaggcctacgaccagcagctcaaagcgggtgacaatccgtacctgcggtataaccacgccgacgccgagtttcaggagcgtctgcaagaagatacgtcttttgggggcaacctcgggcgagcagtcttccaggccaagaagcgggttctcgaacctctcggtctggttgaggaaggcgctaagacggctcctggaaagaagagaccggtagagccatcaccccagcgttctccagactcctctacgggcatcggcaagaaaggccagcagcccgcgaaaaagagactcaactttgggcagactggcgactcagagtcagtgcccgaccctcaaccaatcggagaaccccccgcaggcccctctggtctgggatctggtacaatggctgcaggcggtggcgctccaatggcagacaataacgaaggcgccgacggagtgggtagttcctcaggaaattggcattgcgattccacatggctgggcgactgagtcatcaccaccagcacccgaacctgggccctccccacctacaacaaccacctctacaagcaaatctccaacgggacttcgggaggaagcaccaacgacaacacctacttcggctacagcaccccctgggggtattttgactttaacagattccactgccacttctcaccacgtgactggcagcgactcatcaacaacaactggggattccggcccaagagactcaacttcaagctcttcaacatccaggtcaaggaggtcacgcagaatgaaggcaccaagaccatcgccaataaccttaccagcacgattcaggtctttacggactcggaataccagctcccgtacgtcctcggctctgcgcaccagggctgcctgcctccgttcccggcggacgtcttcatgattcctcagtacgggtacctgactctgaacaatggcagtcaggccgtgggccgttcctccttctactgcctggagtactttccttctcaaatgctgagaacgggcaacaactttgagttcagctaccagtttgaggacgtgccttttcacagcagctacgcgcacagccaaagcctggaccggctgatgaaccccctcatcgaccagtacctgtactacctgtctcggactcagtccacgggaggtaccgcaggaactcagcagttgctattttctcaggccgggcctaataacatgtcggctcaggccaaaaactggctacccgggccctgctaccggcagtaacgcgtctccacgacactgtcgcaaaataacaacagcaactttgtctggaccggtgccaccaagtatcatctgaatggcagagactctctggtagatcccggtgtcgctatggcaacccacaaggacgacgaagagcgattttttccgtccagcggagtcataatgtttgggaaacagggagctggaaaagacaacgtggactatagcagcgtcatgctaaccagtgaggaagaaattaaaaccaccaacccagtggccacagaacagtacggcgtggtggccgataacctgcaacagcaaaacgccgctcctattgtaggggccgtcaacagtcaaggagccttacctggcatggtctggcagaaccgggacgtgtacctgcagggtcctacctgggccaagattcctcacacggacggaaactttcatccctcgccgctgatgggaggctttggactgaaacacccgcctcctcagatcctgattaagaatacacctgttcccgcggatcctccaactaccttcagtcaagctaagctggcgtcgttcatcacgcagtacagcaccggacaggtcagcgtggaaattgaatgggagctgcaggaagaaaacagcaaacgctggaacccagagattcaatacacttccaactactacaaatctacaaatgtggactttgctgttaacacagatggcacttattctgagcctcgccccatcggcacccgttacctcacccgtaatctgtaattgcttgttaatcaataaaccggttgattcgtttcagttgaactttggtctctgcgaagggcgaattc

SEQ ID NO: 29 - protein, 738 aa, Adeno-associated virus
MAADGYLPDWLEDNLSEGIREWWALKPGAPKPKANQQKQDDGRGLVLPGYKYLGPFNGLDKGEPVNAADAAALEHDKAYDQQLKAGDNPYLRYNHADAEFQERLQEDTSFGGNLGRAVFQAKKRVLEPLGLVEEGAKTAPGKKRPVEPSPQRSPDSSTGIGKKGQQPAKKRLNFGQTGDSESVPDPQPIGEPPAGPSGLGSGTMAAGGGAPMADNNEGADGVGSSSGNWHCDSTWLGDGVITTSTRTWALPTYNNHLYKQISNGTSGGSTNDNTYFGYSTPWGYFDFNRFHCHFSPRDWQRLINNNWGFRPKSLNFKLFNIQVKEVTQNEGTKTIANNLTSTIQVFTDSEYQLPYVLGSAHQGCLPPFPADVFMIPQYGYLTLNNGSQAVGRSSFYCLEYFPSQMLRTGNNFEFSYQFEDVPFHSSYAHSQSLDRLMNPLIDQYLYYLSRTQSTGGTAGTQQLLFSQAGPNNMSAQAKNWLPGPCYRQQRVSTTLSQNDNSNFAWTGATKYHLNGRDSLVNPGVAMATHKDDEERFFPSSGVLMFGKQGAGKDNVDYSSVMLTSEEEIKTTNPVATEQYGVVADNLQQQNAAPIVGAVNSQGALPGMVWQNRDVYLQGPIWAKIPHTDGNFHPSPLMGGFGLKHPPPQILIKNTPVPADPPTTFSQAKLASFITQYSTGQVSVEIEWELQKENSKRWNPEIQYTSNYYKSTNVDFAVNTDGTYSEPRPIGTRYLTRNL

SEQ ID NO: 30 - DNA, 3121 bp, Adeno-associated virus
gaattcgcccttcgcgagaccaaagttcaactgaaacgaatcaaccggtttattgattaacaagcaattacagattacgggtgaggtaacgggtgccgatggggcgaggctcagaataagtgccatctgtgttaacagcaaagtccacatttgtagatttgtagtagttggaagtgtattgaatctctgggttccagcgtttgctgttttctttctgcagctcccattcaatttccacgctgacctgtccggtgctgtactgcgtgatgaacgacgccagcttagcttgactgaaggtagttggaggatccgcgggaacaggtgtattcttaatcaggatctgaggaggcgggtgtttcagtccaaagcctcccatcagcggcgagggatgaaagtttccgtccgtgtgaggaatcttggcccagataggaccctgcaggtacacgtcccggttctgccagaccatgccaggtaaggctccttgactgttgacggcccctacaataggagcggcgttttgctgttgcaggttatcggccaccacgccgtactgttctgtggccactgggttggtggttttaatttcttcctcactggttagcataacgctgctatagtccacgttgtcttttccagctccctgtttcccaaacattaagactccgctggacggaaaaaatcgctcttcgtcgtccttgtgggttgccatagcgacaccgggatttaccagagagtctctgccattcagatgatacttggtggcaccggtccaggcaaagttgctgttgtcattttgcgacagtgtcgtggagacgcgttgctgccggtagcagggcccgggtagccagtttttggcctgagccgacatgttattaggcccggcctgagaaaatagcaactgctgagttcctgcggtacctcccgtggactgagtccgagacaggtagtacaggtactggtcgatgagggggttcatcagccggtccaggctttggctgtgcgcgtagctgctgtgaaaaggcacgtcctcaaactggtagctgaactcaaagttgttgcccgttctcagcatttgagaaggaaagtactccaggcagtagaaggaggaacggcccacggcctgactgccattgttcagagtcaggtacccgtactgaggaatcatgaagacgtccgccgggaacggaggcaggcagccctggtgcgcagagccgaggacgtacgggagctggtattccgagtccgtaaagacctgaatcgtgctggtaaggttattggcgatggtcttggtgccttcattctgcgtgacctccttgacctggatgttgaagagcttgaagttgaggctcttgggccggaatccccagttgttgttgatgagtcgctgccagtcacgtggtgagaagtggcagtggaatctgttaaagtcaaaatacccccagggggtgctgtagccgaagtaggtgttgtcgttggtgcttcctcccgaagtcccgttggagatttgcttgtagaggtggttgttgtaggtggggagggcccaggttcgggtgctggtggtgatgactccgtcgcccagccatgtggaatcgcaatgccaatttcctgaggaactacccactccgtcggcgccttcgttattgtctgccattggagcgccaccgcctgcagccattgtaccagatcccagaccagaggggcctgcggggggttctccgattggttgagggtcgggcactgactctgagtcgccagtctgcccaaagttgagtctctttttcgcgggctgctggcctttcttgccgatgcccgtagaggagtctggagaacgctggggtgatggctctaccggtctcttctttccaggagccgtcttagcgccttcctcaaccagaccgagaggttcgagaacccgcttcttggcctggaagactgctcgcccgaggttgcccccaaaagacgtatcttcttgcagacgctcctgaaactcggcgtcggcgtggttataccgcaggtacggattgtcacccgctttgagctgctggtcgtaggccttgtcgtgctcgagggccgctgcgtccgccgcgttgacgggctcccccttgtcgagtccgttgaagggtccgaggtacttgtagccaggaagcaccagaccccggccgtcgtcctgcttttgctggttggctttgggcttcggggctccaggtttcagcgcccaccactcgcgaatgccctcagagaggttgtcctcgagccaatctggaagataaccatcggcagccatacctgatttaaatcatttattgttcaaagatgcagtcatccaaatccacattgaccagatcgcaggcagtgcaagcgtctggcacctttcccatgatatgatgaatgtagcacagtttctgatacgcctttttgacgacagaaacgggttgagattctgacacgggaaagcactctaaacagtctttctgtccgtgagtgaagcagatatttgaattctgattcattctctcgcattgtctgcagggaaacagcatcagattcatgcccacgtgacgagaacatttgttttggtacctgtctgcgtagttgatcgaagcttccgcgtctgacgtcgatggctgcgcaactgactcgcgcacccgtttgggctcacttatatctgcgtcactgggggcgggtcttttcttggctccaccctttttgacgtagaattcatgctccacctcaaccacgtgatcctttgcccaccggaaaaagtctttgacttcctgcttggtgaccttcccaaagtcatgatccagacggcgggtgagttcaaatttgaacatccggtcttgcaacggctgctggtgttcgaaggtcgttgagttcccgtcaatcacggcgcacatgttggtgttggaggtgacgatcacgggagtcgggtctatctgggccgaggacttgcatttctggtccacgcgcaccttgcttcctccgagaatggctttggccgactccacgaccttggcggtcatcttcccctcctcccaccagatcaccatcttgtcgacacagtcgttgaagggaaagttctcattggtccagttgacgcagccgtagaaagggcgaattc

SEQ ID NO: 31 - DNA, 2211 bp, Adeno-associated virus
atggctgctgacggttatcttccagattggctcgaggacaacctttctgaaggcattcgtgagtggtgggctctgaaacctggagtccctcaacccaaagcgaaccaacaacaccaggacaaccgtcggggtcttgtgcttccgggttacaaatacctcggacccggtaacggactcgacaaaggagagccggtcaacgaggcggacgcggcagccctcgaacacgacaaagcttacgaccagcagctcaaggccggtgacaacccgtacctcaagtacaaccacgccgacgccgagtttcaggagcgtcttcaagaagatacgtcttttgggggcaaccttggcagagcagtcttccaggccaaaaagaggatccttgagcctcttggtctggttgaggaagcagctaaaacggctcctggaaagaagggggctgtagatcagtctcctcaggaaccggactcatcatctggtgttggcaaatcgggcaaacagcctgccagaaaaagactaaatttcggtcagactggagactcagagtcagtcccagaccctcaacctctcggagaaccaccagcagcccccacaagtttgggatctaatacaatggcttcaggcggtggcgcaccaatggcagacaataacgagggtgccgatggagtgggtaattcctcaggaaattggcattgcgattcccaatggctgggcgacagagtcatcaccaccagcaccagaacctgggccctgcccacttacaacaaccatctctacaagcaaatctccagccaatcaggagcttcaaacgacaaccactactttggctacagcaccccttgggggtattttgactttaacagattccactgccacttctcaccacgtgactggcagcgactcattaacaacaactggggattccggcccaagaaactcagcttcaagctcttcaacatccaagttagaggggtcacgcagaacgatggcacgacgactattgccaataaccttaccagcacggttcaagtgtttacggactcggagtatcagctcccgtacgtgctcgggtcggcgcaccaaggctgtctcccgccgtttccagcggacgtcttcatggtccctcagtatggatacctcaccctgaacaacggaagtcaagcggtgggacgctcatccttttactgcctggagtacttcccttcgcagatgctaaggactggaaataacttccaattcagctataccttcgaggatgtaccttttcacagcagctacgctcacagccagagtttggatcgcttgatgaatcctcttattgatcagtatctgtactacctgaacagaacgcaaggaacaacctctggaacaaccaaccaatcacggctgctttttagccaggctgggcctcagtctatgtctttgcaggccagaaattggctacctgggccctgctaccggcaacagagactttcaaagactgctaacgacaacaacaacagtaactttccttggacagcggccagcaaatatcatctcaatggccgcgactcgctggtgaatccaggaccagctatggccagtcacaaggacgatgaagaaaaatttttccctatgcacggcaatctaatatttggcaaagaagggacaacggcaagtaacgcagaattagataatgtaatgattacggatgaagaagagattcgtaccaccaatcctgtggcaacagagcagtatggaactgtggcaaataacttgcagagctcaaatacagctcccacgactggaactgtcaatcatcagggggccttacctggcatggtgtggcaagatcgtgacgtgtaccttcaaggacctatctgggcaaagattcctcacacggatggacactttcatccttctcctctgatgggaggctttggactgaaacatccgcctcctcaaatcatgatcaaaaatactccggtaccggcaaatcctccgacgactttcagcccggccaagtttgcttcatttatcactcagtactccactggacaggtcagcgtggaaattgagtgggagctacagaaagaaaacagcaaacgttggaatccagagattcagtacacttccaactacaacaagtctgttaatgtggactttactgtagacactaatggtgtttatagtgaacctcgccctattggaacccggtatctcacacgaaacttgtga

SEQ ID NO: 32 - protein, 736 aa, Adeno-associated virus 3
MAADGYLPDWLEDNLSEGIREWWALKPGVPQPKANQQHQDNRRGLVLPGYKYLGPGNGLDKGEPVNEADAAALEHDKAYDQQLKAGDNPYLKYNHADAEFQERLQEDTSFGGNLGRAVFQAKKRILEPLGLVEEAAKTAPGKKGAVDQSPQEPDSSSGVGKSGKQPARKRLNFGQTGDSESVPDPQPLGEPPAAPTSLGSNTMASGGGAPMADNNEGADGVGNSSGNWHCDSQWLGDRVITTSTRTWALPTYNNHLYKQISSQSGASNDNHYFGYSTPWGYFDFNRFHCHFSPRDWQRLINNNWGFRPKKLSFKLFNIQVRGVTQNDGTTTIANNLTSTVQVFTDSEYQLPYVLGSAHQGCLPPFPADVFMVPQYGYLTLNNGSQAVGRSSFYCLEYFPSQMLRTGNNFQFSYTFEDVPFHSSYAHSQSLDRLMNPLIDQYLYYLNRTQGTTSGTTNQSRLLFSQAGPQSMSLQARNWLPGPCYRQQRLSKTANDNNNSNFPWTAASKYHLNGRDSLVNPGPAMASHKDDEEKFFPMHGNLIFGKEGTTASNAELDNVMITDEEEIRTTNPVATEQYGTVANNLQSSNTAPTTGTVNHQGALPGMVWQDRDVYLQGPIWAKIPHTDGHFHPSPLMGGFGLKHPPPQIMIKNTPVPANPPTTFSPAKFASFITQYSTGQVSVEIEWELQKENSKRWNPEIQYTSNYNKSVNVDFTVDTNGVYSEPRPIGTRYLTRNL

SEQ ID NO: 33 - DNA, 4726 bp, Adeno-associated virus 3
ttggccactccctctatgcgcactcgctcgctcggtggggcctggcgaccaaaggtcgccagacggacgtgctttgcacgtccggccccaccgagcgagcgagtgcgcatagagggagtggccaactccatcactagaggtatggcagtgacgtaacgcgaagcgcgcgaagcgagaccacgcctaccagctgcgtcagcagtcaggtgacccttttgcgacagtttgcgacaccacgtggccgctgagggtatatattctcgagtgagcgaaccaggagctccattttgaccgcgaaatttgaacgagcagcagccatgccggggttctacgagattgtcctgaaggtcccgagtgacctggacgagcgcctgccgggcatttctaactcgtttgttaactgggtggccgagaaggaatgggacgtgccgccggattctgacatggatccgaatctgattgagcaggcacccctgaccgtggccgaaaagcttcagcgcgagttcctggtggagtggcgccgcgtgagtaaggccccggaggccctcttttttgtccagttcgaaaagggggagacctacttccacctgcacgtgctgattgagaccatcggggtcaaatccatggtggtcggccgctacgtgagccagattaaagagaagctggtgacccgcatctaccgcggggtcgagccgcagcttccgaactggttcgcggtgaccaaaacgcgaaatggcgccgggggcgggaacaaggtggtggacgactgctacatccccaactacctgctccccaagacccagcccgagctccagtgggcgtggactaacatggaccagtatttaagcgcctgtttgaatctcgcggagcgtaaacggctggtggcgcagcatctgacgcacgtgtcgcagacgcaggagcagaacaaagagaatcagaaccccaattctgacgcgccggtcatcaggtcaaaaacctcagccaggtacatggagctggtcgggtggctggtggaccgcgggatcacgtcagaaaagcaatggattcaggaggaccaggcctcgtacatctccttcaacgccgcctccaactcgcggtcccagatcaaggccgcgctggacaatgcctccaagatcatgagcctgacaaagacggctccggactacctggtgggcagcaacccgccggaggacattaccaaaaatcggatctaccaaatcctggagctgaacgggtacgatccgcagtacgcggcctccgtcttcctgggctgggcgcaaaagaagttcgggaagaggaacaccatctggctctttgggccggccacgacgggtaaaaccaacatcgcggaagccatcgcccacgccgtgcccttctacggctgcgtaaactggaccaatgagaactttcccttcaacgattgcgtcgacaagatggtgatctggtgggaggagggcaagatgacggccaaggtcgtggagagcgccaaggccattctgggcggaagcaaggtgcgcgtggaccaaaagtgcaagtcatcggcccagatcgaacccactcccgtgatcgtcacctccaacaccaacatgtgcgccgtgattgacgggaacagcaccaccttcgagcatcagcagccgctgcaggaccggatgtttgaatttgaacttacccgccgtttggaccatgactttgggaaggtcaccaaacaggaagtaaaggactttttccggtgggcttccgatcacgtgactgacgtggctcatgagttctacgtcagaaagggtggagctaagaaacgccccgcctccaatgacgcggatgtaagcgagccaaaacgggagtgcacgtcacttgcgcagccgacaacgtcagacgcggaagcaccggcggactacgcggacaggtaccaaaacaaatgttctcgtcacgtgggcatgaatctgatgctttttccctgtaaaacatgcgagagaatgaatcaaatttccaatgtctgttttacgcatggtcaaagagactgtggggaatgcttccctggaatgtcagaatctcaacccgtttctgtcgtcaaaaagaagacttatcagaaactgtgtccaattcatcatatcctgggaagggcacccgagattgcctgttcggcctgcgatttggccaatgtggacttggatgactgtgtttctgagcaataaatgacttaaaccaggtatggctgctgacggttatcttccagattggctcgaggacaacctttctgaaggcattcgtgagtggtgggctctgaaacctggagtccctcaacccaaagcgaaccaacaacaccaggacaaccgtcggggtcttgtgcttccgggttacaaatacctcggacccggtaacggactcgacaaaggagagccggtcaacgaggcggacgcggcagccctcgaacacgacaaagcttacgaccagcagctcaaggccggtgacaacccgtacctcaagtacaaccacgccgacgccgagtttcaggagcgtcttcaagaagatacgtcttttgggggcaaccttggcagagcagtcttccaggccaaaaagaggatccttgagcctcttggtctggttgaggaagcagctaaaacggctcctggaaagaagggggctgtagatcagtctcctcaggaaccggactcatcatctggtgttggcaaatcgggcaaacagcctgccagaaaaagactaaatttcggtcagactggagactcagagtcagtcccagaccctcaacctctcggagaaccaccagcagcccccacaagtttgggatctaatacaatggcttcaggcggtggcgcaccaatggcagacaataacgagggtgccgatggagtgggtaattcctcaggaaattggcattgcgattcccaatggctgggcgacagagtcatcaccaccagcaccagaacctgggccctgcccacttacaacaaccatctctacaagcaaatctccagccaatcaggagcttcaaacgacaaccactactttggctacagcaccccttgggggtattttgactttaacagattccactgccacttctcaccacgtgactggcagcgactcattaacaacaactggggattccggcccaagaaactcagcttcaagctcttcaacatccaagttagaggggtcacgcagaacgatggcacgacgactattgccaataaccttaccagcacggttcaagtgtttacggactcggagtatcagctcccgtacgtgctcgggtcggcgcaccaaggctgtctcccgccgtttccagcggacgtcttcatggtccctcagtatggatacctcaccctgaacaacggaagtcaagcggtgggacgctcatccttttactgcctggagtacttcccttcgcagatgctaaggactggaaataacttccaattcagctataccttcgaggatgtaccttttcacagcagctacgctcacagccagagtttggatcgcttgatgaatcctcttattgatcagtatctgtactacctgaacagaacgcaaggaacaacctctggaacaaccaaccaatcacggctgctttttagccaggctgggcctcagtctatgtctttgcaggccagaaattggctacctgggccctgctaccggcaacagagactttcaaagactgctaacgacaacaacaacagtaactttccttggacagcggccagcaaatatcatctcaatggccgcgactcgctggtgaatccaggaccagctatggccagtcacaaggacgatgaagaaaaatttttccctatgcacggcaatctaatatttggcaaagaagggacaacggcaagtaacgcagaattagataatgtaatgattacggatgaagaagagattcgtaccaccaatcctgtggcaacagagcagtatggaactgtggcaaataacttgcagagctcaaatacagctcccacgactggaactgtcaatcatcagggggccttacctggcatggtgtggcaagatcgtgacgtgtaccttcaaggacctatctgggcaaagattcctcacacggatggacactttcatccttctcctctgatgggaggctttggactgaaacatccgcctcctcaaatcatgatcaaaaatactccggtaccggcaaatcctccgacgactttcagcccggccaagtttgcttcatttatcactcagtactccactggacaggtcagcgtggaaattgagtgggagctacagaaagaaaacagcaaacgttggaatccagagattcagtacacttccaactacaacaagtctgttaatgtggactttactgtagacactaatggtgtttatagtgaacctcgccctattggaacccggtatctcacacgaaacttgtgaatcctggttaatcaataaaccgtttaattcgtttcagttgaactttggctcttgtgcacttctttatctttatcttgtttccatggctactgcgtagataagcagcggcctgcggcgcttgcgcttcgcggtttacaactgctggttaatatttaactctcgccatacctctagtgatggagttggccactccctctatgcgcactcgctcgctcggtggggcctggcgaccaaaggtcgccagacggacgtgctttgcacgtccggccccaccgagcgagcgagtgcgcatagagggagtggccaa

SEQ ID NO: 34 - protein, 737 aa, Adeno-associated virus
MAADGYLPDWLEDNLSEGIREWWDLKPGAPKPKANQQKQDNGRGLVLPGYKYLGPFNGLDKGEPVNAADAAALEHDKAYDQQLNAGDNPYLRYNHADAEFQERLQEDTSFGGNLGRAVFQAKKRVLEPLGLVEEGAKTAPAKKRPVEPSPQRSPDSSTGIGKKGQQPARKRLNFGQTGDSESVPDPQPLGEPPAAPSSVGSGTVAAGGGAPMADNNEGADGVGNASGNWHCDSTWLGDRVITTSTRTWALPTYNNHLYEQISSETAGSTNDNTYFGYSTPWGYFDFNRFHCHFSPRDWQRLINNNWGFRPKKLRFKLFNIQVKEVTTNDGVTTIANNLTSTIQVFSDSEYQLPYVLGSAHQGCLPPFPADVFMIPQYGYLTLNNGSQSVGRSSFYCLEYFPSQMLRTGNNFEFSYSFEDVPFHSSYAHSQSLDRLMNPLIDQYLYYLARTQSDPGGTAGNRELQFYQGGPSTMAEQAKNWLPGPCFRQQRVSKTLDQNNNSNFAWTGATKYHLNGRNSLVNPGVAMATHKDDEDRFFPSSGVLIFGKTGATNKTTLENVLMTNEEEIRPTNPVATEEYGIVSSNLQAANTAAQTQVVNNQGALPGMVWQNRDVYLQGPIWAKIPHTDGNFHPSPLMGGFGLKHPPPQILIKNTPVPANPPEVFTPAKFASFITQYSTGQVSVEIEWELQKENSKRWDPEIQYTSNFEKQTGVDFAVDSQGVYSEPRPIGTRYLTRNL

SEQ ID NO: 35 - DNA, 2211 bp, Adeno-associated virus
atggctgctgacggttatcttccagattggctcgaggacaacctttctgaaggcattcgtgagtggtgggctctgaaacctggagtccctcaacccaaagcgaaccaacaacaccaggacaaccgtcggggtcttgtgcttccgggttacaaatacctcggacccggtaacggactcgacaaaggagagccggtcaacgaggcggacgcggcagccctcgaacacgacaaagcttacgaccagcagctcaaggccggtgacaacccgtacctcaagtacaaccacgccgacgccgagtttcaggagcgtcttcaagaagatacgtcttttgggggcaaccttggcagagcagtcttccaggccaaaaagaggatccttgagcctcttggtctggttgaggaagcagctaaaacggctcctggaaagaagggggctgtagatcagtctcctcaggaaccggactcatcatctggtgttggcaaatcgggcaaacagcctgccagaaaaagactaaatttcggtcagactggagactcagagtcagtcccagaccctcaacctctcggagaaccaccagcagcccccacaagtttgggatctaatacaatggcttcaggcggtggcgcaccaatggcagacaataacgagggtgccgatggagtgggtaattcctcaggaaattggcattgcgattcccaatggctgggcgacagagtcatcaccaccagcaccagaacctgggccctgcccacttacaacaaccatctctacaagcaaatctccagccaatcaggagcttcaaacgacaaccactactttggctacagcaccccttgggggtattttgactttaacagattccactgccacttctcaccacgtgactggcagcgactcattaacaacaactggggattccggcccaagaaactcagcttcaagctcttcaacatccaagttagaggggtcacgcagaacgatggcacgacgactattgccaataaccttaccagcacggttcaagtgtttacggactcggagtatcagctcccgtacgtgctcgggtcggcgcaccaaggctgtctcccgccgtttccagcggacgtcttcatggtccctcagtatggatacctcaccctgaacaacggaagtcaagcggtgggacgctcatccttttactgcctggagtacttcccttcgcagatgctaaggactggaaataacttccaattcagctataccttcgaggatgtaccttttcacagcagctacgctcacagccagagtttggatcgcttgatgaatcctcttattgatcagtatctgtactacctgaacagaacgcaaggaacaacctctggaacaaccaaccaatcacggctgctttttagccaggctgggcctcagtctatgtctttgcaggccagaaattggctacctgggccctgctaccggcaacagagactttcaaagactgctaacgacaacaacaacagtaactttccttggacagcggccagcaaatatcatctcaatggccgcgactcgctggtgaatccaggaccagctatggccagtcacaaggacgatgaagaaaaatttttccctatgcacggcaatctaatatttggcaaagaagggacaacggcaagtaacgcagaattagataatgtaatgattacggatgaagaagagattcgtaccaccaatcctgtggcaacagagcagtatggaactgtggcaaataacttgcagagctcaaatacagctcccacgactggaactgtcaatcatcagggggccttacctggcatggtgtggcaagatcgtgacgtgtaccttcaaggacctatctgggcaaagattcctcacacggatggacactttcatccttctcctctgatgggaggctttggactgaaacatccgcctcctcaaatcatgatcaaaaatactccggtaccggcaaatcctccgacgactttcagcccggccaagtttgcttcatttatcactcagtactccactggacaggtcagcgtggaaattgagtgggagctacagaaagaaaacagcaaacgttggaatccagagattcagtacacttccaactacaacaagtctgttaatgtggactttactgtagacactaatggtgtttatagtgaacctcgccctattggaacccggtatctcacacgaaacttgtaa

SEQ ID NO: 36 - protein, 736 aa, Adeno-associated virus; identical to SEQ ID NO: 32

SEQ ID NO: 37 - protein, 736 aa, Adeno-associated virus 3A; identical to SEQ ID NO: 32

SEQ ID NO: 38 - protein, 624 aa, Adeno-associated virus 3A
MPGFYEIVLKVPSDLDERLPGISNSFVNWVAEKEWDVPPDSDMDPNLIEQAPLTVAEKLQREFLVEWRRVSKAPEALFFVQFEKGETYFHLHVLIETIGVKSMVVGRYVSQIKEKLVTRIYRGVEPQLPNWFAVTKTRNGAGGGNKVVDDCYIPNYLLPKTQPELQWAWTNMDQYLSACLNLAERKRLVAQHLTHVSQTQEQNKENQNPNSDAPVIRSKTSARYMELVGWLVDRGITSEKQWIQEDQASYISFNAASNSRSQIKAALDNASKIMSLTKTAPDYLVGSNPPEDITKNRIYQILELNGYDPQYAASVFLGWAQKKFGKRNTIWLFGPATTGKTNIAEAIAHAVPFYGCVNWTNENFPFNDCVDKMVIWWEEGKMTAKVVESAKAILGGSKVRVDQKCKSSAQIEPTPVIVTSNTNMCAVIDGNSTTFEHQQPLQDRMFEFELTRRLDHDFGKVTKQEVKDFFRWASDHVTDVAHEFYVRKGGAKKRPASNDADVSEPKRECTSLAQPTTSDAEAPADYADRYQNKCSRHVGMNLMLFPCKTCERMNQISNVCFTHGQRDCGECFPGMSESQPVSVVKKKTYQKLCPIHHILGRAPEIACSACDLANVDLDDCVSEQ

SEQ ID NO: 39 - protein, 736 aa, Adeno-associated virus 3B
MAADGYLPDWLEDNLSEGIREWWALKPGVPQPKANQQHQDNRRGLVLPGYKYLGPGNGLDKGEPVNEADAAALEHDKAYDQQLKAGDNPYLKYNHADAEFQERLQEDTSFGGNLGRAVFQAKKRILEPLGLVEEAAKTAPGKKRPVDQSPQEPDSSSGVGKSGKQPARKRLNFGQTGDSESVPDPQPLGEPPAAPTSLGSNTMASGGGAPMADNNEGADGVGNSSGNWHCDSQWLGDRVITTSTRTWALPTYNNHLYKQISSQSGASNDNHYFGYSTPWGYFDFNRFHCHFSPRDWQRLINNNWGFRPKKLSFKLFNIQVKEVTQNDGTTTIANNLTSTVQVFTDSEYQLPYVLGSAHQGCLPPFPADVFMVPQYGYLTLNNGSQAVGRSSFYCLEYFPSQMLRTGNNFQFSYTFEDVPFHSSYAHSQSLDRLMNPLIDQYLYYLNRTQGTTSGTTNQSRLLFSQAGPQSMSLQARNWLPGPCYRQQRLSKTANDNNNSNFPWTAASKYHLNGRDSLVNPGPAMASHKDDEEKFFPMHGNLIFGKEGTTASNAELDNVMITDEEEIRTTNPVATEQYGTVANNLQSSNTAPTTRTVNDQGALPGMVWQDRDVYLQGPIWAKIPHTDGHFHPSPLMGGFGLKHPPPQIMIKNTPVPANPPTTFSPAKFASFITQYSTGQVSVEIEWELQKENSKRWNPEIQYTSNYNKSVNVDFTVDTNGVYSEPRPIGTRYLTRNL

SEQ ID NO: 40 - protein, 624 aa, Adeno-associated virus 3B
MPGFYEIVLKVPSDLDEHLPGISNSFVNWVAEKEWELPPDSDMDPNLIEQAPLTVAEKLQREFLVEWRRVSKAPEALFFVQFEKGETYFHLHVLIETIGVKSMVVGRYVSQIKEKLVTRIYRGVEPQLPNWFAVTKTRNGAGGGNKVVDDCYIPNYLLPKTQPELQWAWTNMDQYLSACLNLAERKRLVAQHLTHVSQTQEQNKENQNPNSDAPVIRSKTSARYMELVGWLVDRGITSEKQWIQEDQASYISFNAASNSRSQIKAALDNASKIMSLTKTAPDYLVGSNPPEDITKNRIYQILELNGYDPQYAASVFLGWAQKKFGKRNTIWLFGPATTGKTNIAEAIAHAVPFYGCVNWTNENFPFNDCVDKMVIWWEEGKMTAKVVESAKAILGGSKVRVDQKCKSSAQIEPTPVIVTSNTNMCAVIDGNSTTFEHQQPLQDRMFKFELTRRLDHDFGKVTKQEVKDFFRWASDHVTDVAHEFYVRKGGAKKRPASNDADVSEPKRQCTSLAQPTTSDAEAPADYADRYQNKCSRHVGMNLMLFPCKTCERMNQISNVCFTHGQRDCGECFPGMSESQPVSVVKKKTYQKLCPIHHILGRAPEIACSACDLANVDLDDCVSEQ

SEQ ID NO: 41 - DNA, 4722 bp, Adeno-associated virus 3B
tggccactccctctatgcgcactcgctcgctcggtggggcctggcgaccaaaggtcgccagacggacgtgctttgcacgtccggccccaccgagcgagcgagtgcgcatagagggagtggccaactccatcactagaggtatggcagtgacgtaacgcgaagcgcgcgaagcgagaccacgcctaccagctgcgtcagcagtcaggtgacccttttgcgacagtttgcgacaccacgtggccgctgagggtatatattctcgagtgagcgaaccaggagctccattttgaccgcgaaatttgaacgagcagcagccatgccggggttctacgagattgtcctgaaggtcccgagtgacctggacgagcacctgccgggcatttctaactcgtttgttaactgggtggccgagaaggaatgggagctgccgccggattctgacatggatccgaatctgattgagcaggcacccctgaccgtggccgaaaagcttcagcgcgagttcctggtggagtggcgccgcgtgagtaaggccccggaggccctcttttttgtccagttcgaaaagggggagacctacttccacctgcacgtgctgattgagaccatcggggtcaaatccatggtggtcggccgctacgtgagccagattaaagagaagctggtgacccgcatctaccgcggggtcgagccgcagcttccgaactggttcgcggtgaccaaaacgcgaaatggcgccgggggcgggaacaaggtggtggacgactgctacatccccaactacctgctccccaagacccagcccgagctccagtgggcgtggactaacatggaccagtatttaagcgcctgtttgaatctcgcggagcgtaaacggctggtggcgcagcatctgacgcacgtgtcgcagacgcaggagcagaacaaagagaatcagaaccccaattctgacgcgccggtcatcaggtcaaaaacctcagccaggtacatggagctggtcgggtggctggtggaccgcgggatcacgtcagaaaagcaatggattcaggaggaccaggcctcgtacatctccttcaacgccgcctccaactcgcggtcccagatcaaggccgcgctggacaatgcctccaagatcatgagcctgacaaagacggctccggactacctggtgggcagcaacccgccggaggacattaccaaaaatcggatctaccaaatcctggagctgaacgggtacgatccgcagtacgcggcctccgtcttcctgggctgggcgcaaaagaagttcgggaagaggaacaccatctggctctttgggccggccacgacgggtaaaaccaacatcgcggaagccatcgcccacgccgtgcccttctacggctgcgtaaactggaccaatgagaactttcccttcaacgattgcgtcgacaagatggtgatctggtgggaggagggcaagatgacggccaaggtcgtggagagcgccaaggccattctgggcggaagcaaggtgcgcgtggaccaaaagtgcaagtcatcggcccagatcgaacccactcccgtgatcgtcacctccaacaccaacatgtgcgccgtgattgacgggaacagcaccaccttcgagcatcagcagccgctgcaggaccggatgtttaaatttgaacttacccgccgtttggaccatgactttgggaaggtcaccaaacaggaagtaaaggactttttccggtgggcttccgatcacgtgactgacgtggctcatgagttctacgtcagaaagggtggagctaagaaacgccccgcctccaatgacgcggatgtaagcgagccaaaacggcagtgcacgtcacttgcgcagccgacaacgtcagacgcggaagcaccggcggactacgcggacaggtaccaaaacaaatgttctcgtcacgtgggcatgaatctgatgctttttccctgtaaaacatgcgagagaatgaatcaaatttccaatgtctgttttacgcatggtcaaagagactgtggggaatgcttccctggaatgtcagaatctcaacccgtttctgtcgtcaaaaagaagacttatcagaaactgtgtccaattcatcatatcctgggaagggcacccgagattgcctgttcggcctgcgatttggccaatgtggacttggatgactgtgtttctgagcaataaatgacttaaaccaggtatggctgctgacggttatcttccagattggctcgaggacaacctttctgaaggcattcgtgagtggtgggctctgaaacctggagtccctcaacccaaagcgaaccaacaacaccaggacaaccgtcggggtcttgtgcttccgggttacaaatacctcggacccggtaacggactcgacaaaggagagccggtcaacgaggcggacgcggcagccctcgaacacgacaaagcttacgaccagcagctcaaggccggtgacaacccgtacctcaagtacaaccacgccgacgccgagtttcaggagcgtcttcaagaagatacgtcttttgggggcaaccttggcagagcagtcttccaggccaaaaagaggatccttgagcctcttggtctggttgaggaagcagctaaaacggctcctggaaagaagaggcctgtagatcagtctcctcaggaaccggactcatcatctggtgttggcaaatcgggcaaacagcctgccagaaaaagactaaatttcggtcagactggcgactcagagtcagtcccagaccctcaacctctcggagaaccaccagcagcccccacaagtttgggatctaatacaatggcttcaggcggtggcgcaccaatggcagacaataacgagggtgccgatggagtgggtaattcctcaggaaattggcattgcgattcccaatggctgggcgacagagtcatcaccaccagcaccagaacctgggccctgcccacttacaacaaccatctctacaagcaaatctccagccaatcaggagcttcaaacgacaaccactactttggctacagcaccccttgggggtattttgactttaacagattccactgccacttctcaccacgtgactggcagcgactcattaacaacaactggggattccggcccaagaaactcagcttcaagctcttcaacatccaagttaaagaggtcacgcagaacgatggcacgacgactattgccaataaccttaccagcacggttcaagtgtttacggactcggagtatcagctcccgtacgtgctcgggtcggcgcaccaaggctgtctcccgccgtttccagcggacgtcttcatggtccctcagtatggatacctcaccctgaacaacggaagtcaagcggtgggacgctcatccttttactgcctggagtacttcccttcgcagatgctaaggactggaaataacttccaattcagctataccttcgaggatgtaccttttcacagcagctacgctcacagccagagtttggatcgcttgatgaatcctcttattgatcagtatctgtactacctgaacagaacgcaaggaacaacctctggaacaaccaaccaatcacggctgctttttagccaggctgggcctcagtctatgtctttgcaggccagaaattggctacctgggccctgctaccggcaacagagactttcaaagactgctaacgacaacaacaacagtaactttccttggacagcggccagcaaatatcatctcaatggccgcgactcgctggtgaatccaggaccagctatggccagtcacaaggacgatgaagaaaaatttttccctatgcacggcaatctaatatttggcaaagaagggacaacggcaagtaacgcagaattagataatgtaatgattacggatgaagaagagattcgtaccaccaatcctgtggcaacagagcagtatggaactgtggcaaataacttgcagagctcaaatacagctcccacgactagaactgtcaatgatcagggggccttacctggcatggtgtggcaagatcgtgacgtgtaccttcaaggacctatctgggcaaagattcctcacacggatggacactttcatccttctcctctgatgggaggctttggactgaaacatccgcctcctcaaatcatgatcaaaaatactccggtaccggcaaatcctccgacgactttcagcccggccaagtttgcttcatttatcactcagtactccactggacaggtcagcgtggaaattgagtgggagctacagaaagaaaacagcaaacgttggaatccagagattcagtacacttccaactacaacaagtctgttaatgtggactttactgtagacactaatggtgtttatagtgaacctcgccctattggaacccggtatctcacacgaaacttgtaatcctggttaatcaataaaccgtttaattcgtttcagttgaactttggctcttgtgcacttcttatcttatcttgtttccatggctactgcgtagataagcagcggcctgcggcgcttgcgcttcgcggtttacaactgctggttaatatttaactctcgccatacctctagtgatggagttggccactccctctatgcgcactcgctcgctcggtggggccggacgtgcaaagcacgtccgtctggcgacctttggtcgccaggccccaccgagcgagcgagtgcgcatagagggagtggccaa

SEQ ID NO: 42 - DNA, 1800 bp, Adeno-associated virus 4
  modified_base (342)..(342): n = a, c, t, or g
  misc_feature (342)..(342): n is a, c, g, or t
acggctcctggaaagaagagaccgttgattgaatccccccagcagcccgactcctccacgggtatcggcaaaaaaggcaagcagccggctaaaaagaagctcgttttcgaagacgaaactggagcaggcgacggaccccctgagggatcaacttccggagccatgtctgatgacagtgagatgcgtgcagcagctggcggagctgcagtcgagggsggacaaggtgccgatggagtgggtaatgcctcgggtgattggcattgcgattccacctggtctgagggccacgtcacgaccaccagcaccagaacctgggtcttgcccacctacaacaaccacctntacaagcgactcggagagagcctgcagtccaacacctacaacggattctccaccccctggggatactttgacttcaaccgcttccactgccacttctcaccacgtgactggcagcgactcatcaacaacaactggggcatgcgacccaaagccatgcgggtcaaaatcttcaacatccaggtcaaggaggtcacgacgtcgaacggcgagacaacggtggctaataaccttaccagcacggttcagatctttgcggactcgtcgtacgaactgccgtacgtgatggatgcgggtcaagagggcagcctgcctccttttcccaacgacgtctttatggtgccccagtacggctactgtggactggtgaccggcaacacttcgcagcaacagactgacagaaatgccttctactgcctggagtactttccttcgcagatgctgcggactggcaacaactttgaaattacgtacagttttgagaaggtgcctttccactcgatgtacgcgcacagccagagcctggaccggctgatgaaccctctcatcgaccagtacctgtggggactgcaatcgaccaccaccggaaccaccctgaatgccgggactgccaccaccaactttaccaagctgcggcctaccaacttttccaactttaaaaagaactggctgcccgggccttcaatcaagcagcagggcttctcaaagactgccaatcaaaactacaagatccctgccaccgggtcagacagtctcatcaaatacgagacgcacagcactctggacggaagatggagtgccctgacccccggacctccaatggccacggctggacctgcggacagcaagttcagcaacagccagctcatctttgcggggcctaaacagaacggcaacacggccaccgtacccgggactctgatcttcacctctgaggaggagctggcagccaccaacgccaccgatacggacatgtggggcaacctacctggcggtgaccagagcaacagcaacctgccgaccgtggacagactgacagccttgggagccgtgcctggaatggtctggcaaaacagagacatttactaccagggtcccatttgggccaagattcctcataccgatggacactttcacccctcaccgctgattggtgggtttgggctgaaacacccgcctcctcaaatttttatcaagaacaccccggtacctgcgaatcctgcaacgaccttcagctctactccggtaaactccttcattactcagtacagcactggccaggtgtcggtgcagattgactgggagatccagaaggagcggtccaaacgctggaaccccgaggtccagtttacctccaactacggacagcaaaactctctgttgtgggctcccgatgcggctgggaaatacactgagcctagggctatcggtacccgctacctcacccaccacctgtaataa

SEQ ID NO: 43 - DNA, 2208 bp, Adeno-associated virus 4
  modified_base (750)..(750): n = a, c, t, or g
  misc_feature (750)..(750): n is a, c, g, or t
atgactgacggttaccttccagattggctagaggacaacctctctgaaggcgttcgagagtggtgggcgctgcaacctggagcccctaaacccaaggcaaatcaacaacatcaggacaacgctcggggtcttgtgcttccgggttacaaatacctcggacccggcaacggactcgacaagggggaacccgtcaacgcagcggacgcggcagccctcgagcacgacaaggcctacgaccagcagctcaaggccggtgacaacccctacctcaagtacaaccacgccgacgcggagttccagcagcggcttcagggcgacacatcgtttgggggcaacctcggcagagcagtcttccaggccaaaaagagggttcttgaacctcttggtctggttgagcaagcgggtgagacggctcctggaaagaagagaccgttgattgaatccccccagcagcccgactcctccacgggtatcggcaaaaaaggcaagcagccggctaaaaagaagctcgttttcgaagacgaaactggagcaggcgacggaccccctgagggatcaacttccggagccatgtctgatgacagtgagatgcgtgcagcagctggcggagctgcagtcgagggsggacaaggtgccgatggagtgggtaatgcctcgggtgattggcattgcgattccacctggtctgagggccacgtcacgaccaccagcaccagaacctgggtcttgcccacctacaacaaccacctntacaagcgactcggagagagcctgcagtccaacacctacaacggattctccaccccctggggatactttgacttcaaccgcttccactgccacttctcaccacgtgactggcagcgactcatcaacaacaactggggcatgcgacccaaagccatgcgggtcaaaatcttcaacatccaggtcaaggaggtcacgacgtcgaacggcgagacaacggtggctaataaccttaccagcacggttcagatctttgcggactcgtcgtacgaactgccgtacgtgatggatgcgggtcaagagggcagcctgcctccttttcccaacgacgtctttatggtgccccagtacggctactgtggactggtgaccggcaacacttcgcagcaacagactgacagaaatgccttctactgcctggagtactttccttcgcagatgctgcggactggcaacaactttgaaattacgtacagttttgagaaggtgcctttccactcgatgtacgcgcacagccagagcctggaccggctgatgaaccctctcatcgaccagtacctgtggggactgcaatcgaccaccaccggaaccaccctgaatgccgggactgccaccaccaactttaccaagctgcggcctaccaacttttccaactttaaaaagaactggctgcccgggccttcaatcaagcagcagggcttctcaaagactgccaatcaaaactacaagatccctgccaccgggtcagacagtctcatcaaatacgagacgcacagcactctggacggaagatggagtgccctgacccccggacctccaatggccacggctggacctgcggacagcaagttcagcaacagccagctcatctttgcggggcctaaacagaacggcaacacggccaccgtacccgggactctgatcttcacctctgaggaggagctggcagccaccaacgccaccgatacggacatgtggggcaacctacctggcggtgaccagagcaacagcaacctgccgaccgtggacagactgacagccttgggagccgtgcctggaatggtctggcaaaacagagacatttactaccagggtcccatttgggccaagattcctcataccgatggacactttcacccctcaccgctgattggtgggtttgggctgaaacacccgcctcctcaaatttttatcaagaacaccccggtacctgcgaatcctgcaacgaccttcagctctactccggtaaactccttcattactcagtacagcactggccaggtgtcggtgcagattgactgggagatccagaaggagcggtccaaacgctggaaccccgaggtccagtttacctccaactacggacagcaaaactctctgttgtgggctcccgatgcggctgggaaatacactgagcctagggctatcggtacccgctacctcacccaccacctgtaataa

SEQ ID NO: 44 - DNA, 1872 bp, Adeno-associated virus 4
atgccggggttctacgagatcgtgctgaaggtgcccagcgacctggacgagcacctgcccggcatttctgactcttttgtgagctgggtggccgagaaggaatgggagctgccgccggattctgacatggacttgaatctgattgagcaggcacccctgaccgtggccgaaaagctgcaacgcgagttcctggtcgagtggcgccgcgtgagtaaggccccggaggccctcttctttgtccagttcgagaagggggacagctacttccacctgcacatcctggtggagaccgtgggcgtcaaatccatggtggtgggccgctacgtgagccagattaaagagaagctggtgacccgcatctaccgcggggtcgagccgcagcttccgaactggttcgcggtgaccaagacgcgtaatggcgccggaggcgggaacaaggtggtggacgactgctacatccccaactacctgctccccaagacccagcccgagctccagtgggcgtggactaacatggaccagtatataagcgcctgtttgaatctcgcggagcgtaaacggctggtggcgcagcatctgacgcacgtgtcgcagacgcaggagcagaacaaggaaaaccagaaccccaattctgacgcgccggtcatcaggtcaaaaacctccgccaggtacatggagctggtcgggtggctggtggaccgcgggatcacgtcagaaaagcaatggatccaggaggaccaggcgtcctacatctccttcaacgccgcctccaactcgcggtcacaaatcaaggccgcgctggacaatgcctccaaaatcatgagcctgacaaagacggctccggactacctggtgggccagaacccgccggaggacatttccagcaaccgcatctaccgaatcctcgagatgaacgggtacgatccgcagtacgcggcctccgtcttcctgggctgggcgcaaaagaagttcgggaagaggaacaccatctggctctttgggccggccacgacgggtaaaaccaacatcgcggaagccatcgcccacgccgtgcccttctacggctgcgtgaactggaccaatgagaactttccgttcaacgattgcgtcgacaagatggtgatctggtgggaggagggcaagatgacggccaaggtcgtagagagcgccaaggccatcctgggcggaagcaaggtgcgcgtggaccaaaagtgcaagtcatcggcccagatcgacccaactcccgtgatcgtcacctccaacaccaacatgtgcgcggtcatcgacggaaactcgaccaccttcgagcaccaacaaccactccaggaccggatgttcaagttcgagctcaccaagcgcctggagcacgactttggcaaggtcaccaagcaggaagtcaaagactttttccggtgggcgtcagatcacgtgaccgaggtgactcacgagttttacgtcagaaagggtggagctagaaagaggcccgcccccaatgacgcagatataagtgagcccaagcgggcctgtccgtcagttgcgcagccatcgacgtcagacgcggaagctccggtggactacgcggacaggtaccaaaacaaatgttctcgtcacgtgggtatgaatctgatgctttttccctgccggcaatgcgagagaatgaatcagaatgtggacatttgcttcacgcacggggtcatggactgtgccgagtgcttccccgtgtcagaatctcaacccgtgtctgtcgtcagaaagcggacgtatcagaaactgtgtccgattcatcacatcatggggagggcgcccgaggtggcctgctcggcctgcgaactggccaatgtggacttggatgactgtgacatggaacaataa

SEQ ID NO: 45 - DNA, 1611 bp, Adeno-associated virus 4
atgccggggttctacgagatcgtgctgaaggtgcccagcgacctggacgagcacctgcccggcatttctgactcttttgtgagctgggtggccgagaaggaatgggagctgccgccggattctgacatggacttgaatctgattgagcaggcacccctgaccgtggccgaaaagctgcaacgcgagttcctggtcgagtggcgccgcgtgagtaaggccccggaggccctcttctttgtccagttcgagaagggggacagctacttccacctgcacatcctggtggagaccgtgggcgtcaaatccatggtggtgggccgctacgtgagccagattaaagagaagctggtgacccgcatctaccgcggggtcgagccgcagcttccgaactggttcgcggtgaccaagacgcgtaatggcgccggaggcgggaacaaggtggtggacgactgctacatccccaactacctgctccccaagacccagcccgagctccagtgggcgtggactaacatggaccagtatataagcgcctgtttgaatctcgcggagcgtaaacggctggtggcgcagcatctgacgcacgtgtcgcagacgcaggagcagaacaaggaaaaccagaaccccaattctgacgcgccggtcatcaggtcaaaaacctccgccaggtacatggagctggtcgggtggctggtggaccgcgggatcacgtcagaaaagcaatggatccaggaggaccaggcgtcctacatctccttcaacgccgcctccaactcgcggtcacaaatcaaggccgcgctggacaatgcctccaaaatcatgagcctgacaaagacggctccggactacctggtgggccagaacccgccggaggacatttccagcaaccgcatctaccgaatcctcgagatgaacgggtacgatccgcagtacgcggcctccgtcttcctgggctgggcgcaaaagaagttcgggaagaggaacaccatctggctctttgggccggccacgacgggtaaaaccaacatcgcggaagccatcgcccacgccgtgcccttctacggctgcgtgaactggaccaatgagaactttccgttcaacgattgcgtcgacaagatggtgatctggtgggaggagggcaagatgacggccaaggtcgtagagagcgccaaggccatcctgggcggaagcaaggtgcgcgtggaccaaaagtgcaagtcatcggcccagatcgacccaactcccgtgatcgtcacctccaacaccaacatgtgcgcggtcatcgacggaaactcgaccaccttcgagcaccaacaaccactccaggaccggatgttcaagttcgagctcaccaagcgcctggagcacgactttggcaaggtcaccaagcaggaagtcaaagactttttccggtgggcgtcagatcacgtgaccgaggtgactcacgagttttacgtcagaaagggtggagctagaaagaggcccgcccccaatgacgcagatataagtgagcccaagcgggcctgtccgtcagttgcgcagccatcgacgtcagacgcggaagctccggtggactacgcggacagattggctagaggacaacctctctga

SEQ ID NO: 46 - DNA, 1872 bp, Adeno-associated virus 4; identical to SEQ ID NO: 44

SEQ ID NO: 47 - DNA, 1617 bp, Adeno-associated virus 4
  modified_base (162)..(162): n = a, c, t, or g
  misc_feature (162)..(162): n is a, c, g, or t
atgcgtgcagcagctggcggagctgcagtcgagggsggacaaggtgccgatggagtgggtaatgcctcgggtgattggcattgcgattccacctggtctgagggccacgtcacgaccaccagcaccagaacctgggtcttgcccacctacaacaaccacctntacaagcgactcggagagagcctgcagtccaacacctacaacggattctccaccccctggggatactttgacttcaaccgcttccactgccacttctcaccacgtgactggcagcgactcatcaacaacaactggggcatgcgacccaaagccatgcgggtcaaaatcttcaacatccaggtcaaggaggtcacgacgtcgaacggcgagacaacggtggctaataaccttaccagcacggttcagatctttgcggactcgtcgtacgaactgccgtacgtgatggatgcgggtcaagagggcagcctgcctccttttcccaacgacgtctttatggtgccccagtacggctactgtggactggtgaccggcaacacttcgcagcaacagactgacagaaatgccttctactgcctggagtactttccttcgcagatgctgcggactggcaacaactttgaaattacgtacagttttgagaaggtgcctttccactcgatgtacgcgcacagccagagcctggaccggctgatgaaccctctcatcgaccagtacctgtggggactgcaatcgaccaccaccggaaccaccctgaatgccgggactgccaccaccaactttaccaagctgcggcctaccaacttttccaactttaaaaagaactggctgcccgggccttcaatcaagcagcagggcttctcaaagactgccaatcaaaactacaagatccctgccaccgggtcagacagtctcatcaaatacgagacgcacagcactctggacggaagatggagtgccctgacccccggacctccaatggccacggctggacctgcggacagcaagttcagcaacagccagctcatctttgcggggcctaaacagaacggcaacacggccaccgtacccgggactctgatcttcacctctgaggaggagctggcagccaccaacgccaccgatacggacatgtggggcaacctacctggcggtgaccagagcaacagcaacctgccgaccgtggacagactgacagccttgggagccgtgcctggaatggtctggcaaaacagagacatttactaccagggtcccatttgggccaagattcctcataccgatggacactttcacccctcaccgctgattggtgggtttgggctgaaacacccgcctcctcaaatttttatcaagaacaccccggtacctgcgaatcctgcaacgaccttcagctctactccggtaaactccttcattactcagtacagcactggccaggtgtcggtgcagattgactgggagatccagaaggagcggtccaaacgctggaaccccgaggtccagtttacctccaactacggacagcaaaactctctgttgtgggctcccgatgcggctgggaaatacactgagcctagggctatcggtacccgctacctcacccaccacctgtaa

SEQ ID NO: 48 - DNA, 939 bp, Adeno-associated virus 4
atggagctggtcgggtggctggtggaccgcgggatcacgtcagaaaagcaatggatccaggaggaccaggcgtcctacatctccttcaacgccgcctccaactcgcggtcacaaatcaaggccgcgctggacaatgcctccaaaatcatgagcctgacaaagacggctccggactacctggtgggccagaacccgccggaggacatttccagcaaccgcatctaccgaatcctcgagatgaacgggtacgatccgcagtacgcggcctccgtcttcctgggctgggcgcaaaagaagttcgggaagaggaacaccatctggctctttgggccggccacgacgggtaaaaccaacatcgcggaagccatcgcccacgccgtgcccttctacggctgcgtgaactggaccaatgagaactttccgttcaacgattgcgtcgacaagatggtgatctggtgggaggagggcaagatgacggccaaggtcgtagagagcgccaaggccatcctgggcggaagcaaggtgcgcgtggaccaaaagtgcaagtcatcggcccagatcgacccaactcccgtgatcgtcacctccaacaccaacatgtgcgcggtcatcgacggaaactcgaccaccttcgagcaccaacaaccactccaggaccggatgttcaagttcgagctcaccaagcgcctggagcacgactttggcaaggtcaccaagcaggaagtcaaagactttttccggtgggcgtcagatcacgtgaccgaggtgactcacgagttttacgtcagaaagggtggagctagaaagaggcccgcccccaatgacgcagatataagtgagcccaagcgggcctgtccgtcagttgcgcagccatcgacgtcagacgcggaagctccggtggactacgcggacagattggctagaggacaacctctctga

SEQ ID NO: 49 - DNA, 1197 bp, Adeno-associated virus 4
atggagctggtcgggtggctggtggaccgcgggatcacgtcagaaaagcaatggatccaggaggaccaggcgtcctacatctccttcaacgccgcctccaactcgcggtcacaaatcaaggccgcgctggacaatgcctccaaaatcatgagcctgacaaagacggctccggactacctggtgggccagaacccgccggaggacatttccagcaaccgcatctaccgaatcctcgagatgaacgggtacgatccgcagtacgcggcctccgtcttcctgggctgggcgcaaaagaagttcgggaagaggaacaccatctggctctttgggccggccacgacgggtaaaaccaacatcgcggaagccatcgcccacgccgtgcccttctacggctgcgtgaactggaccaatgagaactttccgttcaacgattgcgtcgacaagatggtgatctggtgggaggagggcaagatgacggccaaggtcgtagagagcgccaaggccatcctgggcggaagcaaggtgcgcgtggaccaaaagtgcaagtcatcggcccagatcgacccaactcccgtgatcgtcacctccaacaccaacatgtgcgcggtcatcgacggaaactcgaccaccttcgagcaccaacaaccactccaggaccggatgttcaagttcgagctcaccaagcgcctggagcacgactttggcaaggtcaccaagcaggaagtcaaagactttttccggtgggcgtcagatcacgtgaccgaggtgactcacgagttttacgtcagaaagggtggagctagaaagaggcccgcccccaatgacgcagatataagtgagcccaagcgggcctgtccgtcagttgcgcagccatcgacgtcagacgcggaagctccggtggactacgcggacaggtaccaaaacaaatgttctcgtcacgtgggtatgaatctgatgctttttccctgccggcaatgcgagagaatgaatcagaatgtggacatttgcttcacgcacggggtcatggactgtgccgagtgcttccccgtgtcagaatctcaacccgtgtctgtcgtcagaaagcggacgtatcagaaactgtgtccgattcatcacatcatggggagggcgcccgaggtggcctgctcggcctgcgaactggccaatgtggacttggatgactgtgacatggaacaa

SEQ ID NO: 50 - DNA, 245 bp, Adeno-associated virus 4
ctccatcatctaggtttgcccactgacgtcaatgtgacgtcctagggttagggaggtccctgtattagcagtcacgtgagtgtcgtatttcgcggagcgtagcggagcgcataccaagctgccacgtcacagccacgtggtccgtttgcgacagtttgcgacaccatgtggtcaggagggtatataaccgcgagtgagccagcgaggagctccattttgcccgcgaattttgaacgagcagcagc

SEQ ID NO: 51 - protein, 313 aa, Adeno-associated virus 4
  MOD_RES (313)..(313): Xaa = any amino acid
MELVGWLVDRGITSEKQWIQEDQASYISFNAASNSRSQIKAALDNASKIMSLTKTAPDYLVGQNPPEDISSNRIYRILEMNGYDPQYAASVFLGWAQKKFGKRNTIWLFGPATTGKTNIAEAIAHAVPFYGCVNWTNENFPFNDCVDKMVIWWEEGKMTAKVVESAKAILGGSKVRVDQKCKSSAQIDPTPVIVTSNTNMCAVIDGNSTTFEHQQPLQDRMFKFELTKRLEHDFGKVTKQEVKDFFRWASDHVTEVTHEFYVRKGGARKRPAPNDADISEPKRACPSVAQPSTSDAEAPVDYADRLARGQPLX

SEQ ID NO: 52 - protein, 399 aa, Adeno-associated virus 4
MELVGWLVDRGITSEKQWIQEDQASYISFNAASNSRSQIKAALDNASKIMSLTKTAPDYLVGQNPPEDISSNRIYRILEMNGYDPQYAASVFLGWAQKKFGKRNTIWLFGPATTGKTNIAEAIAHAVPFYGCVNWTNENFPFNDCVDKMVIWWEEGKMTAKVVESAKAILGGSKVRVDQKCKSSAQIDPTPVIVTSNTNMCAVIDGNSTTFEHQQPLQDRMFKFELTKRLEHDFGKVTKQEVKDFFRWASDHVTEVTHEFYVRKGGARKRPAPNDADISEPKRACPSVAQPSTSDAEAPVDYADRYQNKCSRHVGMNLMLFPCRQCERMNQNVDICFTHGVMDCAECFPVSESQPVSVVRKRTYQKLCPIHHIMGRAPEVACSACELANVDLDDCDMEQ

SEQ ID NO: 53 - protein, 623 aa, Adeno-associated virus 4
MPGFYEIVLKVPSDLDEHLPGISDSFVSWVAEKEWELPPDSDMDLNLIEQAPLTVAEKLQREFLVEWRRVSKAPEALFFVQFEKGDSYFHLHILVETVGVKSMVVGRYVSQIKEKLVTRIYRGVEPQLPNWFAVTKTRNGAGGGNKVVDDCYIPNYLLPKTQPELQWAWTNMDQYISACLNLAERKRLVAQHLTHVSQTQEQNKENQNPNSDAPVIRSKTSARYMELVGWLVDRGITSEKQWIQEDQASYISFNAASNSRSQIKAALDNASKIMSLTKTAPDYLVGQNPPEDISSNRIYRILEMNGYDPQYAASVFLGWAQKKFGKRNTIWLFGPATTGKTNIAEAIAHAVPFYGCVNWTNENFPFNDCVDKMVIWWEEGKMTAKVVESAKAILGGSKVRVDQKCKSSAQIDPTPVIVTSNTNMCAVIDGNSTTFEHQQPLQDRMFKFELTKRLEHDFGKVTKQEVKDFFRWASDHVTEVTHEFYVRKGGARKRPAPNDADISEPKRACPSVAQPSTSDAEAPVDYADRYQNKCSRHVGMNLMLFPCRQCERMNQNVDICFTHGVMDCAECFPVSESQPVSVVRKRTYQKLCPIHHIMGRAPEVACSACELANVDLDDCDMEQ

SEQ ID NO: 54 - protein, 537 aa, Adeno-associated virus 4
  MOD_RES (537)..(537): Xaa = any amino acid
MPGFYEIVLKVPSDLDEHLPGISDSFVSWVAEKEWELPPDSDMDLNLIEQAPLTVAEKLQREFLVEWRRVSKAPEALFFVQFEKGDSYFHLHILVETVGVKSMVVGRYVSQIKEKLVTRIYRGVEPQLPNWFAVTKTRNGAGGGNKVVDDCYIPNYLLPKTQPELQWAWTNMDQYISACLNLAERKRLVAQHLTHVSQTQEQNKENQNPNSDAPVIRSKTSARYMELVGWLVDRGITSEKQWIQEDQASYISFNAASNSRSQIKAALDNASKIMSLTKTAPDYLVGQNPPEDISSNRIYRILEMNGYDPQYAASVFLGWAQKKFGKRNTIWLFGPATTGKTNIAEAIAHAVPFYGCVNWTNENFPFNDCVDKMVIWWEEGKMTAKVVESAKAILGGSKVRVDQKCKSSAQIDPTPVIVTSNTNMCAVIDGNSTTFEHQQPLQDRMFKFELTKRLEHDFGKVTKQEVKDFFRWASDHVTEVTHEFYVRKGGARKRPAPNDADISEPKRACPSVAQPSTSDAEAPVDYADRLARGQPLX

SEQ ID NO: 55 - protein, 623 aa, Adeno-associated virus 4; identical to SEQ ID NO: 53

SEQ ID NO: 56 - protein, 544 aa, Adeno-associated virus 4
MSDDSEMRAAAGGAAVEGGQGADGVGNASGDWHCDSTWSEGHVTTTSTRTWVLPTYNNHLYKRLGESLQSNTYNGFSTPWGYFDFNRFHCHFSPRDWQRLINNNWGMRPKAMRVKIFNIQVKEVTTSNGETTVANNLTSTVQIFADSSYELPYVMDAGQEGSLPPFPNDVFMVPQYGYCGLVTGNTSQQQTDRNAFYCLEYFPSQMLRTGNNFEITYSFEKVPFHSMYAHSQSLDRLMNPLIDQYLWGLQSTTTGTTLNAGTATTNFTKLRPTNFSNFKKNWLPGPSIKQQGFSKTANQNYKIPATGSDSLIKYETHSTLDGRWSALTPGPPMATAGPADSKFSNSQLIFAGPKQNGNTATVPGTLIFTSEEELAATNATDTDMWGNLPGGDQSNSNLPTVDRLTALGAVPGMVWQNRDIYYQGPIWAKIPHTDGHFHPSPLIGGFGLKHPPPQIFIKNTPVPANPATTFSSTPVNSFITQYSTGQVSVQIDWEIQKERSKRWNPEVQFTSNYGQQNSLLWAPDAAGKYTEPRAIGTRYLTHHL

SEQ ID NO: 57 - protein, 734 aa, Adeno-associated virus 4
MTDGYLPDWLEDNLSEGVREWWALQPGAPKPKANQQHQDNARGLVLPGYKYLGPGNGLDKGEPVNAADAAALEHDKAYDQQLKAGDNPYLKYNHADAEFQQRLQGDTSFGGNLGRAVFQAKKRVLEPLGLVEQAGETAPGKKRPLIESPQQPDSSTGIGKKGKQPAKKKLVFEDETGAGDGPPEGSTSGAMSDDSEMRAAAGGAAVEGGQGADGVGNASGDWHCDSTWSEGHVTTTSTRTWVLPTYNNHLYKRLGESLQSNTYNGFSTPWGYFDFNRFHCHFSPRDWQRLINNNWGMRPKAMRVKIFNIQVKEVTTSNGETTVANNLTSTVQIFADSSYELPYVMDAGQEGSLPPFPNDVFMVPQYGYCGLVTGNTSQQQTDRNAFYCLEYFPSQMLRTGNNFEITYSFEKVPFHSMYAHSQSLDRLMNPLIDQYLWGLQSTTTGTTLNAGTATTNFTKLRPTNFSNFKKNWLPGPSIKQQGFSKTANQNYKIPATGSDSLIKYETHSTLDGRWSALTPGPPMATAGPADSKFSNSQLIFAGPKQNGNTATVPGTLIFTSEEELAATNATDTDMWGNLPGGDQSNSNLPTVDRLTALGAVPGMVWQNRDIYYQGPIWAKIPHTDGHFHPSPLIGGFGLKHPPPQIFIKNTPVPANPATTFSSTPVNSFITQYSTGQVSVQIDWEIQKERSKRWNPEVQFTSNYGQQNSLLWAPDAAGKYTEPRAIGTRYLTHHL

SEQ ID NO: 58 - protein, 598 aa, Adeno-associated virus 4
TAPGKKRPLIESPQQPDSSTGIGKKGKQPAKKKLVFEDETGAGDGPPEGSTSGAMSDDSEMRAAAGGAAVEGGQGADGVGNASGDWHCDSTWSEGHVTTTSTRTWVLPTYNNHLYKRLGESLQSNTYNGFSTPWGYFDFNRFHCHFSPRDWQRLINNNWGMRPKAMRVKIFNIQVKEVTTSNGETTVANNLTSTVQIFADSSYELPYVMDAGQEGSLPPFPNDVFMVPQYGYCGLVTGNTSQQQTDRNAFYCLEYFPSQMLRTGNNFEITYSFEKVPFHSMYAHSQSLDRLMNPLIDQYLWGLQSTTTGTTLNAGTATTNFTKLRPTNFSNFKKNWLPGPSIKQQGFSKTANQNYKIPATGSDSLIKYETHSTLDGRWSALTPGPPMATAGPADSKFSNSQLIFAGPKQNGNTATVPGTLIFTSEEELAATNATDTDMWGNLPGGDQSNSNLPTVDRLTALGAVPGMVWQNRDIYYQGPIWAKIPHTDGHFHPSPLIGGFGLKHPPPQIFIKNTPVPANPATTFSSTPVNSFITQYSTGQVSVQIDWEIQKERSKRWNPEVQFTSNYGQQNSLLWAPDAAGKYTEPRAIGTRYLTHHL

SEQ ID NO: 59 - DNA, 129 bp, Adeno-associated virus 4
ttggccactccctctatgcgcgctcgctcactcactcggccctgcggccagaggccggcagtctggagacctttggtgtccagggcagggccgagtgagtgagcgagcgcgcatagagggagtggccaa

SEQ ID NO: 60 - DNA, 125 bp, Adeno-associated virus 4
ttggccactccctctatgcgcgctcgctcactcactcggccctggagaccaaaggtctccagactgccggcctctggccggcagggccgagtgagtgagcgagcgcgcatagagggagtggccaa

SEQ ID NO: 61 - DNA, 4768 bp, Adeno-associated virus 4
  modified_base (3009)..(3009): n = a, c, t, or g
  misc_feature (3009)..(3009): n is a, c, g, or t
ttggccactccctctatgcgcgctcgctcactcactcggccctggagaccaaaggtctccagactgccggcctctggccggcagggccgagtgagtgagcgagcgcgcatagagggagtggccaactccatcatctaggtttgcccactgacgtcaatgtgacgtcctagggttagggaggtccctgtattagcagtcacgtgagtgtcgtatttcgcggagcgtagcggagcgcataccaagctgccacgtcacagccacgtggtccgtttgcgacagtttgcgacaccatgtggtcaggagggtatataaccgcgagtgagccagcgaggagctccattttgcccgcgaattttgaacgagcagcagccatgccggggttctacgagatcgtgctgaaggtgcccagcgacctggacgagcacctgcccggcatttctgactcttttgtgagctgggtggccgagaaggaatgggagctgccgccggattctgacatggacttgaatctgattgagcaggcacccctgaccgtggccgaaaagctgcaacgcgagttcctggtcgagtggcgccgcgtgagtaaggccccggaggccctcttctttgtccagttcgagaagggggacagctacttccacctgcacatcctggtggagaccgtgggcgtcaaatccatggtggtgggccgctacgtgagccagattaaagagaagctggtgacccgcatctaccgcggggtcgagccgcagcttccgaactggttcgcggtgaccaagacgcgtaatggcgccggaggcgggaacaaggtggtggacgactgctacatccccaactacctgctccccaagacccagcccgagctccagtgggcgtggactaacatggaccagtatataagcgcctgtttgaatctcgcggagcgtaaacggctggtggcgcagcatctgacgcacgtgtcgcagacgcaggagcagaacaaggaaaaccagaaccccaattctgacgcgccggtcatcaggtcaaaaacctccgccaggtacatggagctggtcgggtggctggtggaccgcgggatcacgtcagaaaagcaatggatccaggaggaccaggcgtcctacatctccttcaacgccgcctccaactcgcggtcacaaatcaaggccgcgctggacaatgcctccaaaatcatgagcctgacaaagacggctccggactacctggtgggccagaacccgccggaggacatttccagcaaccgcatctaccgaatcctcgagatgaacgggtacgatccgcagtacgcggcctccgtcttcctgggctgggcgcaaaagaagttcgggaagaggaacaccatctggctctttgggccggccacgacgggtaaaaccaacatcgcggaagccatcgcccacgccgtgcccttctacggctgcgtgaactggaccaatgagaactttccgttcaacgattgcgtcgacaagatggtgatctggtgggaggagggcaagatgacggccaaggtcgtagagagcgccaaggccatcctgggcggaagcaaggtgcgcgtggaccaaaagtgcaagtcatcggcccagatcgacccaactcccgtgatcgtcacctccaacaccaacatgtgcgcggtcatcgacggaaactcgaccaccttcgagcaccaacaaccactccaggaccggatgttcaagttcgagctcaccaagcgcctggagcacgactttggcaaggtcaccaagcaggaagtcaaagactttttccggtgggcgtcagatcacgtgaccgaggtgactcacgagttttacgtcagaaagggtggagctagaaagaggcccgcccccaatgacgcagatataagtgagcccaagcgggcctgtccgtcagttgcgcagccatcgacgtcagacgcggaagctccggtggactacgcggacaggtaccaaaacaaatgttctcgtcacgtgggtatgaatctgatgctttttccctgccggcaatgcgagagaatgaatcagaatgtggacatttgcttcacgcacggggtcatggactgtgccgagtgcttccccgtgtcagaatctcaacccgtgtctgtcgtcagaaagcggacgtatcagaaactgtgtccgattcatcacatcatggggagggcgcccgaggtggcctgctcggcctgcgaactggccaatgtggacttggatgactgtgacatggaacaataaatgactcaaaccagatatgactgacggttaccttccagattggctagaggacaacctctctgaaggcgttcgagagtggtgggcgctgcaacctggagcccctaaacccaaggcaaatcaacaacatcaggacaacgctcggggtcttgtgcttccgggttacaaatacctcggacccggcaacggactcgacaagggggaacccgtcaacgcagcggacgcggcagccctcgagcacgacaaggcctacgaccagcagctcaaggccggtgacaacccctacctcaagtacaaccacgccgacgcggagttccagcagcggcttcagggcgacacaccgtttgggggcaacctcggcagagcagtcttccaggccaaaaagagggttcttgaacctcttggtctggttgagcaagcgggtgagacggctcctggaaagaagagaccgttgattgaatccccccagcagcccgactcctccacgggtatcggcaaaaaaggcaagcagccggctaaaaagaagctcgttttcgaagacgaaactggagcaggcgacggaccccctgagggatcaacttccggagccatgtctgatgacagtgagatgcgtgcagcagctggcggagctgcagtcgagggsggacaaggtgccgatggagtgggtaatgcctcgggtgattggcattgcgattccacctggtctgagggccacgtcacgaccaccagcaccagaacctgggtcttgcccacctacaacaaccacctntacaagcgactcggagagagcctgcagtccaacacctacaacggattctccaccccctggggatactttgacttcaaccgcttccactgccacttctcaccacgtgactggcagcgactcatcaacaacaactggggcatgcgacccaaagccatgcgggtcaaaatcttcaacatccaggtcaaggaggtcacgacgtcgaacggcgagacaacggtggctaataaccttaccagcacggttcagatctttgcggactcgtcgtacgaactgccgtacgtgatggatgcgggtcaagagggcagcctgcctccttttcccaacgacgtctttatggtgccccagtacggctactgtggactggtgaccggcaacacttcgcagcaacagactgacagaaatgccttctactgcctggagtactttccttcgcagatgctgcggactggcaacaactttgaaattacgtacagttttgagaaggtgcctttccactcgatgtacgcgcacagccagagcctggaccggctgatgaaccctctcatcgaccagtacctgtggggactgcaatcgaccaccaccggaaccaccctgaatgccgggactgccaccaccaactttaccaagctgcggcctaccaacttttccaactttaaaaagaactggctgcccgggccttcaatcaagcagcagggcttctcaaagactgccaatcaaaactacaagatccctgccaccgggtcagacagtctcatcaaatacgagacgcacagcactctggacggaagatggagtgccctgacccccggacctccaatggccacggctggacctgcggacagcaagttcagcaacagccagctcatctttgcggggcctaaacagaacggcaacacggccaccgtacccgggactctgatcttcacctctgaggaggagctggcagccaccaacgccaccgatacggacatgtggggcaacctacctggcggtgaccagagcaacagcaacctgccgaccgtggacagactgacagccttgggagccgtgcctggaatggtctggcaaaacagagacatttactaccagggtcccatttgggccaagattcctcataccgatggacactttcacccctcaccgctgattggtgggtttgggctgaaacacccgcctcctcaaatttttatcaagaacaccccggtacctgcgaatcctgcaacgaccttcagctctactccggtaaactccttcattactcagtacagcactggccaggtgtcggtgcagattgactgggagatccagaaggagcggtccaaacgctggaaccccgaggtccagtttacctccaactacggacagcaaaactctctgttgtgggctcccgatgcggctgggaaatacactgagcctagggctatcggtacccgctacctcacccaccacctgtaataacctgttaatcaataaaccggtttattcgtttcagttgaactttggtctccgtgtccttcttatcttatctcgtttccatggctactgcgtacataagcagcggcctgcggcgcttgcgcttcgcggtttacaactgccggttaatcagtaacttctggcaaaccatgatgatggagttggccactccctctatgcgcgctcgctcactcactcggccctggagaccaaaggtctccagactgccggcctctggccggcagggccgagtgagtgagcgagcgcgcatagagggagtggccaa

SEQ ID NO: 62 - protein, 3098 aa, Adeno-associated virus
GAATTCGCCCTTTCTACGGCTGCGTCAACTGGACCAATGAGAACTTTCCCTTCAACGATTGCGTCGACAAGATGGTGATCTGGTGGGAGGAGGGCAAGATGACGGCCAAGGTCGTGGAGTCCGCCAAGGCCATTCTCGGCGGCAGCAAGGTGCGCGTGGACCAAAAGTGCAAGTCTTCCGCCCAGATCGATCCCACCCCCGTGATCGTCACTTCCAACACCAACATGTGCGCTGTGATTGACGGGAACAGCACCACCTTCGAGCACCAGCAGCCGTTACAAGACCGGATGTTCAAATTTGAACTCACCCGCCGTCTGGAGCACGACTTTGGCAAGGTGACAAAGCAGGAAGTCAAAGAGTTCTTCCGCTGGGCGCAGGATCACGTGACCGAGGTGGCGCATGAGTTCTACGTCAGAAAGGGTGGAGCCAACAAGAGACCCGCCCCCGATGACGCGGATAAAAGCGAGCCCAAGCGGGCCTGCCCCTCAGTCGCGGATCCATCGACGTCAGACGCGGAAGGAGCTCCGGTGGACTTTGCCGACAGGTACCAAAACAAATGTTCTCGTCACGCGGGCATGCTTCAGATGCTGTTTCCCTGCAAGACATGCGAGAGAATGAATCAGAATTTCAACATTTGCTTCACGCACGGGACCAGAGACTGTTCAGAATGTTTCCCCGGCGTGTCAGAATCTCAACCGGTCGTCAGAAAGAGGACGTATCGGAAACTCTGTGCCATTCATCATCTGCTGGGGCGGGCTCCCGAGATTGCTTGCTCGGCCTGCGATCTGGTCAACGTGGACCTGGATGACCGTGTTTCTGAGCAATAAATGACTTAAACCAGGTATGGCTGCCGATGGTTATCTTCCAGATTGGCTCGAGGACAACCTCTCTGAGGGCATTCGCGAGTGGTGGGACTTGAAACCTGGAGCCCCGAAACCCAAAGCCAACCAGCAAAAGCAGGACGACGGCCGGGGTCTGGTGCTTCCTGGCTACAAGTACCTCGGACCCTTCAACGGACTCGACAAGGGAGAGCCGGTCAACGAGGCAGACGCCGCGGCCCTCGAGCACGACAAGGCCTACGACAAGCAGCTCGAGCAGGGGGACAACCCGTACCTCAAGTACAACCACGCCGACGCCGAGTTTCAGGAGCGTCTTCAAGAAGATACGTCTTTTGGGGGCAACCTCGGGCGAGCAGTCTTCCAGGCCAAGAAGCGGGTTCTCGAACCTCTCGGTCTGGTTGAGGAAGGCGCTAAGACGGCTCCTGGAAAGAAGAGACCCATAGAATCCCCCGACTCCTCCACGGGCATCGGCAAGAAAGGCCAGCAGCCCGCTAAAAAGAAGCTCAACTTTGGGCAGACTGGCGACTCAGAGTCAGTGCCCGACCCCCAACCTCTCGGAGAACCTCCCGCCGCGCCCTCAGGTCTGGGATCTGGTACAATGGCTGCAGGCGGTGGCGCACCAATGGCAGACAATAACGAAGGCGCCGACGGAGTGGGTAATGCCTCCGGAAATTGGCATTGCGATTCCACATGGCTGGGCGACAGAGTCATCACCACCAGCACCCGCACCTGGGCCCTGCCCACCTACAACAACCACCTCTACAAGCAGATATCAAGTCAGAGCGGGGCTACCAACGACAACCACTTCTTCGGCTACAGCACCCCCTGGGGCTATTTTGACTTCAACAGATTCCACTGCCACTTCTCACCACGTGACTGGCAGCGACTCATCAACAACAACTGGGGATTCCGGCCCAGAAAGCTGCGGTTCAAGTTGTTCAACATCCAGGTCAAGGAGGTCACGACGAACGACGGCGTTACGACCATCGCTAATAACCTTACCAGCACGATTCAGGTCTTCTCGGACTCGGAGTACCAACTGCCGTACGTCCTCGGCTCTGCGCACCAGGGCTGCCTCCCTCCGTTCCCTGCGGACGTGTTCATGATTCCTCAGTACGGATATCTGACTCTAAACAACGGCAGTCAGTCTGTGGGACGTTCCTCCTTCTACTGCCTGGAGTACTTTCCTTCTCAGATGCTGAGAACGGGCAATAACTTTGAATTCAGCTACACCTTTGAGGAAGTGCCTTTCCACAGCAGCTATGCGCACAGCCAGAGCCTGGACCGGCTGATGAATCCCCTCATCGACCAGTACCTGTACTACCTGGCCCGGACCCAGAGCACTACGGGGTCCACAAGGGAGCTGCAGTTCCATCAGGCTGGGCCCAACACCATGGCCGAGCAATCAAAGAACTGGCTGCCCGGACCCTGTTATCGGCAGCAGAGACTGTCAAAAAACATAGACAGCAACAACAACAGTAACTTTGCCTGGACCGGGGCCACTAAATACCATCTGAATGGTAGAAATTCATTAACCAACCCGGGCGTAGCCATGGCCACCAACAAGGACGACGAGGACCAGTTCTTTCCCATCAACGGAGTGCTGGTTTTTGGCGAAACGGGGGCTGCCAACAAGACAACGCTGGAAAACGTGCTAATGACCAGCGAGGAGGAGATCAAAACCACCAATCCCGTGGCTACAGAAGAATACGGTGTGGTCTCCAGCAACCTGCAATCGTCTACGGCCGGACCCCAGACACAGACTGTCAACAGCCAGGGGGCTCTGCCCGGCATGGTCTGGCAGAACCGGGACGTGTACCTGCAGGGTCCCATCTGGGCCAAAATTCCTCACACGGACGGCAACTTTCACCCGTCTCCCCTGATGGGCGGATTTGGACTCAAACACCCGCCTCCTCAAATTCTCATCAAAAACACCCCGGTACCTGCTAATCCTCCAGAGGTGTTTACTCCTGCCAAGTTTGCCTCATTTATCACGCAGTACAGCACCGGCCAGGTCAGCGTGGAGATCGAGTGGGAACTGCAGAAAGAAAACAGCAAACGCTGGAATCCAGAGATTCAGTACACCTCAAATTATGCCAAGTCTAATAATGTGGAATTTGCTGTCAACAACGAAGGGGTTTATACTGAGCCTCGCCCCATTGGCACCCGTTACCTCACCCGTAACCTGTAATTGCCTGTTAATCAATAAACCGGTTAATTCGTTTCAGTTGAACTTTGGTCTCTGCGAAGGGCGAATTC

SEQ ID NO: 63 - protein, 728 aa, Adeno-associated virus
MAADGYLPDWLEDNLSEGIREWWDLKPGAPKPKANQQKQDDGRGLVLPGYKYLGPFNGLDKGEPVNEADAAALEHDKAYDKQLEQGDNPYLKYNHADAEFQERLQEDTSFGGNLGRAVFQAKKRVLEPLGLVEEGAKTAPGKKRPIESPDSSTGIGKKGQQPAKKKLNFGQTGDSESVPDPQPLGEPPAAPSGLGSGTMAAGGGAPMADNNEGADGVGNASGNWHCDSTWLGDRVITTSTRTWALPTYNNHLYKQISSQSGATNDNHFFGYSTPWGYFDFNRFHCHFSPRDWQRLINNNWGFRPRKLRFKLFNIQVKEVTTNDGVTTIANNLTSTIQVFSDSEYQLPYVLGSAHQGCLPPFPADVFMIPQYGYLTLNNGSQSVGRSSFYCLEYFPSQMLRTGNNFEFSYTFEEVPFHSSYAHSQSLDRLMNPLIDQYLYYLARTQSTTGSTRELQFHQAGPNTMAEQSKNWLPGPCYRQQRLSKNIDSNNNSNFAWTGATKYHLNGRNSLTNPGVAMATNKDDEDQFFPINGVLVFGETGAANKTTLENVLMTSEEEIKTTNPVATEEYGVVSSNLQSSTAGPQTQTVNSQGALPGMVWQNRDVYLQGPIWAKIPHTDGNFHPSPLMGGFGLKHPPPQILIKNTPVPANPPEVFTPAKFASFITQYSTGQVSVEIEWELQKENSKRWNPEIQYTSNYAKSNNVEFAVNNEGVYTEPRPIGTRYLTRNL

SEQ ID NO: 64 - DNA, 2495 bp, Adeno-associated virus
gaattcgccctttctacggctgcgtcaactagaccaatgagaactttcccttcaacgattgcgtcgacaagatggtgatctggtgggaggagggcaagatgacggccaaggtcgtggagtccgccaaggccattcatcatctgctggggcgggctcccgagattgcttgctcggcctgcgatctggtcaacgtggacctggatgactgtgtttctgagcaataaatgacttaaaccaggtatggctgccgatggttatcttccagattggctcgaggacaacctctctgagggcattcgcgagtggtgggacttgaaacctggagccccgaaacccaaagccaaccagcaaaagcaggacgacggccggggtctggtgcttcctggctacaagtacctcggacccttcaacggactcgacaagggagagccggtcaacgaggcagacgccgcggccctcgagcacgacaaggcctacgacaagcagctcgagcagggggacaacccgtacctcaagtacaaccacgccgacgccgagtttcaggagcgtcttcaagaagatacgtcttttgggggcaacctcgggcgagcagtcttccaggccaagaagcgggttctcgaacctctcggtctggttgaggaaggcgctaagacggctcctggaaagaagagacccatagaatcccccgactcctccacgggcatcggcaagaaaggccagcagcccgctaaaaagaagctcaactttgggcagactggcgactcagagtcagtgcccgaccctcaaccaatcggagaaccccccgcaggcccctctggtctgggatctggtacaatggctgcaggcggtggcgctccaatggcagacaataacgaaggcgccgacggagtgggtaatgcctccggaaattggcattgcgattccacatggctgggcgacagagtcatcaccaccagcacccgcacctgggccctgcccacctacaacaaccacctctacaagcagatatcaagtcagagcggggctaccaacgacaaccacttcttcggctacagcaccccctggggctattttgacttcaacagattccactgccacttctcaccacgtgactggcagcgactcatcaacaacaactggggattccggcccagaaagctgcggttcaagttgttcaacatccaggtcaaggaggtcacgacgaacgacggcgttacgaccatcgctaataaccttaccagcacgattcaggtcttctcggactcggagtaccaactgccgtacgtcctcggctctgcgcaccagggctgcctccctccgttccctgcggacgtgttcatgattcctcagtacggatatctgactctaaacaacggcagtcagtctgtgggacgttcctccttctactgcctggagtactttccttctcagatgctgagaacgggcaataactttgaattcagctacacctttgaggaagtgcctttccacagcagctatgcgcacagccagagcctggaccggctgatgaatcccctcatcgaccagtacctgtactacctggcccggacccagagcactacggggtccacaagggagctgcagttccatcaggctgggcccaacaccatggccgagcaatcaaagaactggctgcccggaccctgttatcggcagcagagactgtcaaaaaacatagacagcaacaacaccagtaactttgcctggaccggggccactaaataccatctgaatggtagaaattcattaaccaacccgggcgtagccatggccaccaacaaggacgacgaggaccagttctttcccatcaacggagtgctggtttttggcaaaacgggggctgccaacaagacaacgctggaaaacgtgctaatgaccagcgaggaggagatcaaaaccaccaatcccgtggctacagaacagtacggtgtggtctccagcaacctgcaatcgtctacggccggaccccagacacagactgtcaacagccagggggctctgcccggcatggtctggcagaaccgggacgtgtacctgcagggtcccatctgggccaaaattcctcacacggacggcaactttcacccgtctcccctgatgggcggatttggactcaaacacccgcctcctcaaattctcatcaaaaacaccccggtacctgctaatcctccagaggtgtttactcctgccaagtttgcctcatttatcacgcagtacagcaccggccaggtcagcgtggagatcgagtgggaactgcagaaagaaaacagcaaacgctggaatccagagattcagtacacctcaaattatgccaagtctaataatgtggaatttgctgtcaacaacgaaggggtttatactgagcctcgccccattggcacccgttacctcacccgtaacctgtaattgcctgttaatcaataaaccggttaattcgtttcagttgaactttggtctctgcgaagggcgaattc

SEQ ID NO: 65 - protein, 728 aa, Adeno-associated virus
MAADGYLPDWLEDNLSEGIREWWDLKPGAPKPKANQQKQDDGRGLVLPGYKYLGPFNGLDKGEPVNEADAAALEHDKAYDKQLEQGDNPYLKYNHADAEFQERLQEDTSFGGNLGRAVFQAKKRVLEPLGLVEEGAKTAPGKKRPIESPDSSTGIGKKGQQPAKKKLNFGQTGDSESVPDPQPIGEPPAGPSGLGSGTMAAGGGAPMADNNEGADGVGNASGNWHCDSTWLGDRVITTSTRTWALPTYNNHLYKQISSQSGATNDNHFFGYSTPWGYFDFNRFHCHFSPRDWQRLINNNWGFRPRKLRFKLFNIQVKEVTTNDGVTTIANNLTSTIQVFSDSEYQLPYVLGSAHQGCLPPFPADVFMIPQYGYLTLNNGSQSVGRSSFYCLEYFPSQMLRTGNNFEFSYTFEEVPFHSSYAHSQSLDRLMNPLIDQYLYYLARTQSTTGSTRELQFHQAGPNTMAEQSKNWLPGPCYRQQRLSKNIDSNNTSNFAWTGATKYHLNGRNSLTNPGVAMATNKDDEDQFFPINGVLVFGKTGAANKTTLENVLMTSEEEIKTTNPVATEQYGVVSSNLQSSTAGPQTQTVNSQGALPGMVWQNRDVYLQGPIWAKIPHTDGNFHPSPLMGGFGLKHPPPQILIKNTPVPANPPEVFTPAKFASFITQYSTGQVSVEIEWELQKENSKRWNPEIQYTSNYAKSNNVEFAVNNEGVYTEPRPIGTRYLTRNL

SEQ ID NO: 66 - DNA, 2504 bp, Adeno-associated virus
gaattcgccctttctacggctgcgtcaactggaccaatgagaactttcccttcaacgattgcgtcgacaagatggtgatctggtgggaggagggcaagatgacggccaaggtcgtggagtccgccaaggccattcatcatctgctggggcgggctcccgagattgcttgctcggcctgcgatctggtcaacgtggacctggatgactgtgtttctgagcaataaatgacttaaaccaggtatggctgccgatggttatcttccagattggctcgaggacaacctctctgagggcattcgcgagtggtgggacttgaaacctggagccccgaaacccaaagccaaccagcaaaagcaggacgacggccggggtctggtgcttcctggctacaagtacctcggacccttcaacggactcgacaagggagagccggtcaacgaggcagacgccgcggccctcgagcacgacaaggcctacgacaagcagctcgagcagggggacaacccgtacctcaagtacaaccacgccgacgccgagtttcaggagcgtcttcaagaagatacgtcttttgggggcaacctcgggcgagcagtcttccaggccaagaagcgggttctcgaacctctcggtctggttgaggaaggcgctaagacggctcctggaaagaagagacccatagaatcccccgactcctccacgggcatcggcaagaaaggccagcagcccgctaaaaagaagctcaactttgggcagactggcgactcagagtcagtgcccgaccctcaaccaatcggagaaccccccgcaggcccctctggtctgggatctggtacaatggctgcaggcggtggcgctccaatggcagacaataacgaaggcgccgacggagtgggtaatgcctccggaaattggcattgcgattccacatggctgggcgacagagtcatcaccaccagcacccgcacctgggccctgcccacctacaacaaccacctctacaagcagatatcaagtcagagcggggctaccaacgacaaccacttcttcggctacagcaccccctggggctattttgacttcaacagattccactgccacttctcatcacgtgactggcagcgactcatcaacaacaactggggattccggcccaagagactcaacttcaagctcttcaacatccaggtcaaggaggtcacgcagaatgaaggcaccaagaccatcgccaataaccttaccagcacgattcaggtctttacggactcggaataccggctcccgtacgtcctcggctctgcgcaccagggctgcctgcctccgttcccggcggacgtcttcatgattcctcagtacgggtacctgactctgaacaacggcagtcaggccgtgggccgttcctccttctactgcctggagtactttccttctcaaatgctgagaacgggcaacaactttgagttcagctaccagtttgaggacgtgccttttcacagcagctacgcgcacagccaaagcctggaccggctgatgaaccccctcatcgaccagtacctgtactacctgtctcggactcagtccacgggaggtaccgcaggaactcagcagttgctattttctcaggccgggcctaataacatgtcggctcaggccaaaaactggctacccgggccctgctaccggcagcaacgcgtctccacgacactgtcgcaaaataacaacagcaactttgcttggaccggtgccaccaagtatcatctgaatggcagagactctctggtaaatcccggtgtcgctatggcaacgcacaaggacgacgaagagcgattttttccatccagcggagtcttgatgtttgggaaacagggagctggaaaagacaacgtggactatagcagcgttatgctaaccagtgaggaagaaatcaaaaccaccaacccagtggccacagaacagtacggcgtggtggccgataacctgcaacagcaaaacgccgctcctattgtaggggccgtcaacagtcaaggagccttacctggcatggtctggcagaaccgggacgtgtacctgcagggtcctatctgggccaagattcctcacacggacggcaactttcatccttcgccgctgatgggaggctttggactgaaacacccgcctcctcagatcctgattaagaatacacctgttcccgcggatcctccaactaccttcagtcaagccaagccggcgtcgttcatcacgcagtacagcaccggacaggtcagcgtggaaattgaatgggagctgcagaaagagaacagcaagcgctggaacccagagattcagtatacttccaactactacaaatctacaaatgtggactttgctgtcaatactgagggtacttattcagagcctcgccccattggcacccgttacctcacccgtaacctgtaattgcctgttaatcaataaaccggttaattcgtttcagttgaactttggtctctgcgaagggcgaattc

SEQ ID NO: 67 - protein, 731 aa, Adeno-associated virus
MAADGYLPDWLEDNLSEGIREWWDLKPGAPKPKANQQKQDDGRGLVLPGYKYLGPFNGLDKGEPVNEADAAALEHDKAYDKQLEQGDNPYLKYNHADAEFQERLQEDTSFGGNLGRAVFQAKKRVLEPLGLVEEGAKTAPGKKRPIESPDSSTGIGKKGQQPAKKKLNFGQTGDSESVPDPQPIGEPPAGPSGLGSGTMAAGGGAPMADNNEGADGVGNASGNWHCDSTWLGDRVITTSTRTWALPTYNNHLYKQISSQSGATNDNHFFGYSTPWGYFDFNRFHCHFSSRDWQRLINNNWGFRPKRLNFKLFNIQVKEVTQNEGTKTIANNLTSTIQVFTDSEYRLPYVLGSAHQGCLPPFPADVFMIPQYGYLTLNNGSQAVGRSSFYCLEYFPSQMLRTGNNFEFSYQFEDVPFHSSYAHSQSLDRLMNPLIDQYLYYLSRTQSTGGTAGTQQLLFSQAGPNNMSAQAKNWLPGPCYRQQRVSTTLSQNNNSNFAWTGATKYHLNGRDSLVNPGVAMATHKDDEERFFPSSGVLMFGKQGAGKDNVDYSSVMLTSEEEIKTTNPVATEQYGVVADNLQQQNAAPIVGAVNSQGALPGMVWQNRDVYLQGPIWAKIPHTDGNFHPSPLMGGFGLKHPPPQILIKNTPVPADPPTTFSQAKPASFITQYSTGQVSVEIEWELQKENSKRWNPEIQYTSNYYKSTNVDFAVNTEGTYSEPRPIGTRYLTRNL

SEQ ID NO: 68 - DNA, 3128 bp, Adeno-associated virus
gaattcgccctttctacggctgcgtcaactggaccaatgagaactttcccttcaacgattgcgtcgacaagatggtgatctggtgggaggagggcaagatgacggccaaggtcgtggagtccgccaaggccattctcggcggcagcaaggtgcgcgtggaccaaaagtgcaagtcttccgcccagatcgatcccacccccgtgatcgtcacttccaacaccaacatgtgcgccgtgattgacgggaacagcaccaccttcgagcaccagcagccgttacaagaccggatgttcaaatttgaactcacccgccgtctggagcacgactttggcaaggtgacaaagcaggaagtcaaagagttcttccgctgggcgcaggatcacgtgaccgaggtggcgcatgagttctacgtcagaaagggtggagccaacaagagacccgcccccgatgacgcggataaaagcgagcccaagcgggcctgcccctcagtcgcggatccatcgacgtcagacgcggaaggagctccggtggactttgccgacaggtaccaaaacaaatgttctcgtcacgcgggcatgcttcagatgctgtttccctgcaagacatgcgagagaatgaatcagaatttcaacatttgcttcacgcacgggaccagagactgttcagaatgtttccccggcgtgtcagaatctcaaccggtcgtcagaaagaggacgtatcggaaactctgtgccattcatcatctgctagggcgggctcccgagattgcttgctcggcctgcgatctggtcaacgtggacctggatgactgtgtttctgagcaataaatgacttaaaccaggtatggctgccgatggttatcttccagattggctcgaggacaacctctctgagggcattcgcgagtggtgggacttgaaacctggagccccgaaacccaaagccaaccagcaaaagcaggacgacggccggggtctggtgcttcctggctacaagtacctcggacccttcaacggactcgacaagggggagcccgtcaacgcggcggacgcagcggccctcgagcacgacaaggcctacgaccagcagctcaaagcgggtgacaatccgtacctgcggtataaccacgccgacgccgagtttcaggagcgtctgcaagaagatacgtcttttgggggcaacctcgggcgagcagtcttccaggccaagaagcgggttctcgaacctctcggtctggttgaggaaggcgctaagacggctcctggaaagaagagaccggtagagccatcaccccagcgttctccagactcctctacgggcatcggcaagacaggccagcagcccgcgaaaaagagactcaactttgggcagactggcgactcagagtcagtgcccgaccctcaaccaatcggagaaccccccgcaggcccctctggtctgggatctggtacaatggctgcaggcggtggcgctccaatggcagacaataacgaaggcgccgacggagtgggtagttcctcaggaaattggcattgcgattccacatggctgggcgacagagtcatcaccaccagcacccgaacctgggccctccccacctacaacaaccacctctacaagcaaatctccaacgggacatcgggaggaagcaccaacgacaacacctacttcggctacagcaccccctgggggtattttgactttaacagattccactgccacttctcaccacgtgactggcagcgactcatcaacaacaactggggattccggcccaagagactcaacttcaagctcttcaacatccaggtcaaggaggtcacgcagaatgaaggcaccaagaccatcgccaataaccttaccagcacgattcaggtctttacggactcggaataccagctcccgtacgtcctcggctctgcgcaccagggctgcctgcctccgttcccggcggacgtcttcatgattcctcagtacgggtacctgactctgaacaacggcagtcaggccgtgggccgttcctccttctactgcctggagtactttccttctcaaatgctgagaacgggcaacaactttgagttcagctaccagtttgaggacgtgccttttcacagcagctacgcgcacagccaaagcctggaccggctgatgaaccccctcatcgaccagtacctgtactacctgtctcggactcagtccacgggaggtaccgcaggaactcagcagttgctattttctcaggccgggcctaataacatgtcggctcaggccaaaaactggctacccgggccctgctaccggcagcaacgcgtctccacgacactgtcgcaaaataacaacagcaactttgcttggaccggtgccaccaagtatcatctgaatggcagagactctctggtaaatcccggtgtcgctatggcaacgcacaaggacgacgaagagcgattttttccatccagcggagtcttgatgtttgggaaacagggagctggaaaagacaacgtggactatagcagcgttatgctaaccagtgaggaagaaatcaaaaccaccaacccagtggccacagaacagtacggcgtggtggccgataacctgcaacagcaaaacgccgctcctattgtaggggccgtcaacagtcaaggagccttacctggcatggtctggcagaaccgggacgtgtacctgcagggtcctatctgggccaagattcctcacacggacggcaactttcatccttcgccgctgatgggaggctttggactgaaacacccgcctcctcagatcctgattaagaatacacctgttcccgcggatcctccaactaccttcagtcaagccaagctggcgtcgttcatcacgcagtacagcaccggacaggtcagcgtggaaattgaatgggagctgcagaaagagaacagcaagcgctggaacccagagattcagtatacttccaactactacaaatctacaaatgtggactttgctgtcaatactgagggtacttattcagagcctcgccccattggcacccgttacctcacccgtaacctgtaattgcctgttaatcaataaaccggctaattcgtttcagttgaactttggtctctgcgaagggcgaattc

SEQ ID NO: 69 - protein, 738 aa, Adeno-associated virus
MAADGYLPDWLEDNLSEGIREWWDLKPGAPKPKANQQKQDDGRGLVLPGYKYLGPFNGLDKGEPVNAADAAALEHDKAYDQQLKAGDNPYLRYNHADAEFQERLQEDTSFGGNLGRAVFQAKKRVLEPLGLVEEGAKTAPGKKRPVEPSPQRSPDSSTGIGKTGQQPAKKRLNFGQTGDSESVPDPQPIGEPPAGPSGLGSGTMAAGGGAPMADNNEGADGVGSSSGNWHCDSTWLGDRVITTSTRTWALPTYNNHLYKQISNGTSGGSTNDNTYFGYSTPWGYFDFNRFHCHFSPRDWQRLINNNWGFRPKRLNFKLFNIQVKEVTQNEGTKTIANNLTSTIQVFTDSEYQLPYVLGSAHQGCLPPFPADVFMIPQYGYLTLNNGSQAVGRSSFYCLEYFPSQMLRTGNNFEFSYQFEDVPFHSSYAHSQSLDRLMNPLIDQYLYYLSRTQSTGGTAGTQQLLFSQAGPNNMSAQAKNWLPGPCYRQQRVSTTLSQNNNSNFAWTGATKYHLNGRDSLVNPGVAMATHKDDEERFFPSSGVLMFGKQGAGKDNVDYSSVMLTSEEEIKTTNPVATEQYGVVADNLQQQNAAPIVGAVNSQGALPGMVWQNRDVYLQGPIWAKIPHTDGNFHPSPLMGGFGLKHPPPQILIKNTPVPADPPTTFSQAKLASFITQYSTGQVSVEIEWELQKENSKRWNPEIQYTSNYYKSTNVDFAVNTEGTYSEPRPIGTRYLTRNL

SEQ ID NO: 70 - DNA, 3084 bp, Adeno-associated virus
gaattcgccctttctacggctgcatcaactggaccaatgagaactttcccttcaacgattgcgtcgacaagatggtgatctggtgggaggagggcaagatgacggccaaggtcgtggagtccgccaaggccattctcggcggcagcaaggtgcgcgtggaccaaaagtgcaagtcgtccgcccagatcgaccccacccccgtgatcgtcacctccaacaccaacatgtgcgccgtgattgacgggaacagcaccaccttcgagcaccagcagccgttgcaggaccggatgttcaagttcgaactcacccgccgtctggagcacgactttggcaaggtgaccaagcaggaagtcaaagagttcttccgctgggcgcaggatcacgtgaccgaggtggcgcatgagttctacgtcagaaagggcggagccagcaaaagacccgcccccgatgacgcggatataagcgagcccaagcgggcctgcccctcagtcgcggatccatcgacgtcagacgcggaaggagctccggtggactttgccgacaggtaccaaaacaaatgttctcgtcacgcgggcatgcttcagatgctgtttccctgcaaaacgtgcgagaaaatgaatcagaatttcaacatttgcttcacgcacggggtcagagactgctcagaatgtttccccggtgcatcagaatctcaaccggtcgtcagaaaaaaaacgtatcagaaactgtgtgccattcatcatctgctggggcgggcacccgagattgcttgctcggcctgcgatctggtcaacgtggacctggacgactgtgtttctgagcaataaatgacttaaaccaggtatggctgccgatggttatcttccagattggcttgaggacaacctctctgagggcattcgcgagtggtgggacctgaaacctggagccccgaaacccaaagccaaccagcaaaagcaggacgacggccggggtctggtgcttcctggctacaagtacctcggacccttcaacggactcgacaagggggagcccgtcaacgcggcggacgcagcggccctcgagcacgacaaggcctacgaccagcagctcaaagcgggtgacaatccgtacctgcggtataaccacgccgacgccgagtttcaggagcgtctgcaagaagatacgtcttttgggggcaacctcgggcgagcagtcttccaggccaagaagcgggttctcgaacctctcggtctggttgaggaaggcgctaagacggctcctggaaagaagagaccggtagagccatcacctcagcgttcccccgactcctccacgggcatcggcaagaaaggccaccagcccgcgagaaagagactgaactttgggcagactggcgactcggagtcagtccccgaccctcaaccaatcggagaaccaccagcaggcccctctggtctgggatctggtacaatggctgcaggcggtggcgctccaatggcagacaataacgaaggcgccgacggagtgggtagttcctcaggaaattggcattgcgattccacatggctgggcgacagagtcatcaccaccagcacccgaacctgggccctgcccacctacaacaaccatctctacaagcaaatctccaacgggacatcgggaggaagcactaacgacaacacctactttggctacagcaccccctgggggtattttgacttcaacagattccactgccacttctcaccacgtgactggcagcgactcatcaacaataactggggattccggcccaagagactcaacttcaagctcttcaacatccaggtcaaggaggtcacgcagaatgaaggcaccaagaccatcgccaataaccttaccagcacgattcaggtgtttacggactcggaataccagctcccgtacgtccccggctctgcgcaccagggctgcctccctccgttcccggcggacgtcttcatgattcctcagtacgggtatctgaccctaaacaatggcagtcaggctgtgggccgttcctccttctactgcctggaatacttcccttctcaaatgctgaggacgggcaacaactttgaattcagctacaccttcgaggacgtgcctttccacagcagctacgcgcacagccagagcctggaccggctgatgaaccctctcatcgaccagtacctgtattacttatccagaactcagtccacaggaggaactcaaggtactcagcaattgttattttctcaagccgggcccgcaaacatgtcggctcaggccaagaactggctacctggaccgtgttaccgtcagcaacgagtttccacgacactgtcgcaaaacaacaacagcaattttgcttggaccggtgccaccaagtatcacctgaatggcagagactccctggttaatcccggcgttgccatggctacccacaaggacgacgaggagcgcttcttcccgtcaagcggagttctaatgtttggcaagcagggggctggaaaagacaatgtggactacagcagcgtgatgctcaccagcgaagaagaaattaaaactactaacccagtggctacagagcagtatggtgtggtggcagacaacctgcagcagaccaacggagctcccattgtgggaactgtcaacagccagggggccttacctggtatggtctggcaaaaccgggacgtgtacctgcagggccccatctgggccaaaattcctcacacggacggcaactttcatccttcgccgctgatgggaggctttggactgaaacacccgcctcctcagatcctggtgaaaaacactcctgttcctgcggatcctccgaccaccttcagccaggccaagctggcttcttttatcacgcagtacagcaccggacaggtcagcgtggaaatcgaatgggagctgcagaaagaaaacagcaagcgctggaacccagagattcagtatacttccaactactacaaatctacaaatgtggactttgctgtcaatactgagggtacttattcagagcctcgccccattggcactcgttatctcacccgtaatctgtaattgcttgttaatcaataaaccggt

SEQ ID NO: 71 - protein, 738 aa, Adeno-associated virus
MAADGYLPDWLEDNLSEGIREWWDLKPGAPKPKANQQKQDDGRGLVLPGYKYLGPFNGLDKGEPVNAADAAALEHDKAYDQQLKAGDNPYLRYNHADAEFQERLQEDTSFGGNLGRAVFQAKKRVLEPLGLVEEGAKTAPGKKRPVEPSPQRSPDSSTGIGKKGHQPARKRLNFGQTGDSESVPDPQPIGEPPAGPSGLGSGTMAAGGGAPMADNNEGADGVGSSSGNWHCDSTWLGDRVITTSTRTWALPTYNNHLYKQISNGTSGGSTNDNTYFGYSTPWGYFDFNRFHCHFSPRDWQRLINNNWGFRPKRLNFKLFNIQVKEVTQNEGTKTIANNLTSTIQVFTDSEYQLPYVPGSAHQGCLPPFPADVFMIPQYGYLTLNNGSQAVGRSSFYCLEYFPSQMLRTGNNFEFSYTFEDVPFHSSYAHSQSLDRLMNPLIDQYLYYLSRTQSTGGTQGTQQLLFSQAGPANMSAQAKNWLPGPCYRQQRVSTTLSQNNNSNFAWTGATKYHLNGRDSLVNPGVAMATHKDDEERFFPSSGVLMFGKQGAGKDNVDYSSVMLTSEEEIKTTNPVATEQYGVVADNLQQTNGAPIVGTVNSQGALPGMVWQNRDVYLQGPIWAKIPHTDGNFHPSPLMGGFGLKHPPPQILVKNTPVPADPPTTFSQAKLASFITQYSTGQVSVEIEWELQKENSKRWNPEIQYTSNYYKSTNVDFAVNTEGTYSEPRPIGTRYLTRNL

SEQ ID NO: 72 - DNA, 3123 bp, Adeno-associated virus
gaattcgcccttggctgcgtcaactggaccaatgagaactttcccttcaacgattgcgtcgacaagatggtgatctggtgggaggagggcaagatgacggccaaggtcgtggagtccgccaaggccattctcggcggcagcaaggtgcgcgtggaccaaaagtgcaagtcgtccgcccagatcgaccccacccccgtgatcgtcacctccaacaccaacatgtgcgccgtgattgacgggaacagcaccaccttcgagcaccagcagccgttgcaggaccggatgttcaagttcgaactcacccgccgtctggagcacgactttggcaaggtgaccaagcaggaagtcaaagagttcttccgctgggcgcaggatcacgtgaccgaggtggcgcatgagttctacgtcagaaagggcggagccagcaaaagacccgcccccgatgacgcggatataagcgagcccaagcgggcctgcccctcagtcgcggatccatcgacgtcagacgcggaaggagctccggtggactttgccgacaggtaccaaaacaaatgttctcgtcacgcgggcatgctccagatgctgtttccctgcaaaacgtgcgagagaatgaatcagaatttcaacatttgcttcacgcacggggtcagagactgctcagaatgtttccccggtgcatcagaatctcaaccggtcgtcagaaaaaaaacgtatcagaaactgtgtgccattcatcatctgctggggcgggcacccgagattgcttgctcggcctgcgatctggtcaacgtggacctggacgactgtgtttctgagcaataaatgacttaaaccaggtatggctgccgatggttatcttccagattggcttgaggacaacctctctgagggcattcgcgagtggtgggacctgaaacctggagccccgaaacccaaagccaaccagcaaaagcaggacgacggccggggtctggtgcttcctggctacaagtacctcggacccttcaacggactcgacaagggggagcccgtcaacgcggcggacgcagcggccctcgagcacgacaaggcctacgaccagcagctcaaagcgggtgacaatccgtacctgcggtataaccacgccgacgccgagtttcaggagcgtctgcaagaagatacgtcttttgggggcaacctcgggcgagcagtcttccaggccaagaagcgggttctcgaacctctcggtctggttgaggaaggcgctaagacggctcctggaaagaagagaccggtagagccatcacctcagcgttcccccgactcctccacgggcatcggcaagaaaggccaccagcccgcgagaaagagactgaactttgggcagactggcgactcggagtcagtccccgaccctcaaccaatcggagaaccaccagcaggcccctctggtctgggatctggtacaatggctgcaggcggtggcgctccaatggcagacaataacgaaggcgccgacggagtgggtagttcctcaggaaattggcattgcgattccacatggctgggcgacagagtcatcaccaccagcacccgaacctgggccctgcccacctacaacaaccatctctacaagcaaatctccaacgggacatcgggaggaagcactaacgacaacacctactttggctacagcaccccctgggggtattttgacttcaacagattccactgccacttctcaccacgtgactggcagcgactcatcaacaataactggggattccggcccaagagactcaacttcaagctcttcaacatccaggtcaaggaggtcacgcagaatgaaggcaccaagaccatcgccaataaccttaccagcacgattcaggtgtttacggactcggaataccagctcccgtacgtcctcggctctgcgcaccagggctgcctccctccgttcccggcggacgtcttcatgattcctcagtacgggtatctgaccctaaacaatggcagtcaggctgtgggccgttcctccttctactgcctggaatacttcccttctcaaatgctgaggacgggcaacaactttgaattcagctacaccttcgaggacgtgcctttccacagcagctacgcgcacagccagagcctggaccggctgatgaaccctctcatcgaccagtacctgtattacttatccagaactcagtccacaggaggaactcaaggtactcagcaattgttattttctcaagccgggcccgcaaacatgtcggctcaggccaagaactggctacctggaccgtgttaccgtcagcaacgagtttccacgacactgtcgcaaaacaacaacagcaattttgcttggaccggtgccaccaagtatcacctgaatggcagagactccctggttaatcccggcgttgccatggctacccacaaggacgacgaggagcgcttcttcccgtcaagcggagttctaatgtttggcaagcagggggctggaaaagacaatgtggactacagcagcgtgatgctcaccagcgaagaagaaattaaaactactaacccagtggctacagagcagtatggtgtggtggcagacaacctgcagcagaccaacggagctcccattgtgggaactgtcaacagccagggggccttacctggtatggtctggcaaaaccgggacgtgtacctgcagggccccatctgggccaaaattcctcacacggacggcaactttcatccttcgccgctgatgggaggctttggactgaaacacccgcctcctcagatcctggtgaaaaacactcctgttcctgcggatcctccgaccaccttcagccaggccaagctggcttcttttatcacgcagtacagcaccggacaggtcagcgtggaaatcgaatgggagctgcagaaagaaaacagcaagcgctggaacccagagattcagtatacttccaactactacaaatctacaaatgtggactttgctgtcaatactgagggtacttattcagagcctcgccccattggcactcgttatctcacccgtaatctgtaattgcttgttaatcaataaaccggttaattcgtttcagttgaactttggtctctgcgaagggcgaattc

SEQ ID NO: 73 - protein, 738 aa, Adeno-associated virus
MAADGYLPDWLEDNLSEGIREWWDLKPGAPKPKANQQKQDDGRGLVLPGYKYLGPFNGLDKGEPVNAADAAALEHDKAYDQQLKAGDNPYLRYNHADAEFQERLQEDTSFGGNLGRAVFQAKKRVLEPLGLVEEGAKTAPGKKRPVEPSPQRSPDSSTGIGKKGHQPARKRLNFGQTGDSESVPDPQPIGEPPAGPSGLGSGTMAAGGGAPMADNNEGADGVGSSSGNWHCDSTWLGDRVITTSTRTWALPTYNNHLYKQISNGTSGGSTNDNTYFGYSTPWGYFDFNRFHCHFSPRDWQRLINNNWGFRPKRLNFKLFNIQVKEVTQNEGTKTIANNLTSTIQVFTDSEYQLPYVLGSAHQGCLPPFPADVFMIPQYGYLTLNNGSQAVGRSSFYCLEYFPSQMLRTGNNFEFSYTFEDVPFHSSYAHSQSLDRLMNPLIDQYLYYLSRTQSTGGTQGTQQLLFSQAGPANMSAQAKNWLPGPCYRQQRVSTTLSQNNNSNFAWTGATKYHLNGRDSLVNPGVAMATHKDDEERFFPSSGVLMFGKQGAGKDNVDYSSVMLTSEEEIKTTNPVATEQYGVVADNLQQTNGAPIVGTVNSQGALPGMVWQNRDVYLQGPIWAKIPHTDGNFHPSPLMGGFGLKHPPPQILVKNTPVPADPPTTFSQAKLASFITQYSTGQVSVEIEWELQKENSKRWNPEIQYTSNYYKSTNVDFAVNTEGTYSEPRPIGTRYLTRNL

SEQ ID NO: 74 - DNA, 3122 bp, Adeno-associated virus
gaattcgccctttctacggctgcgtcaactggaccaatgagaactttcccttcaacgattgcgtcgacaagatggtgatctggtgggaggagggcaagatgacggccaaggtcgtggagtccgccaaggccattctcggcggcagcaaggtgcgtgtggaccaaaagtgcaagtcttccgcccagatcgatcccacccccgtgatcgtcacctccaacaccaacatgtgcgccgtgattgacgggaacagcgccaccttcgagcaccagcagccgttgcaggaccggatgttcaaatttgaactcacccgccgtctggagcatgactttggcaaggtgacgaagcaggaagtcaaagagttcttccgctgggcgcaggatcacgtgaccgaggtggcgcatgagttccacgtcagaaagggtggagccaacaagagacccgcccccgatgacgcggatataagcgagcccaagcgggcctgcccctcagtcgcggatccatcgacgtcagacgcggaaggagctccggtggactttgccgacaggtaccaaaacaaatgttctcgtcacgcgggcatgcttcagatgctgtttccctgcaagacatgcgagagaatgaatcagaatttcaacatttgcttcacgcacgggaccagagactgttcagaatgtttccccggcgtgtcagaatctcaaccggtcgtcagaaagaggacgtatcggaaactctgtgcgattcatcatctgctggggcgggctcccgagattgcttgctcggcctgcgatctggtcaacgtggacctggatgactgtgtttctgagcaataaatgacttaaaccaggtatggctgccgatggttatcttccagattggctcgaggacaacctctctgagggcattcgcgagtggtgggacttgaaacctggagccccgaaacccaaagccaaccagcaaaagcaggacgacggccggggtctggtgcttcctggctacaagtacctcggacccttcaacggactcgacaagggggagcccgtcaacgcggcggacgcagcggccctcgagcacgacaaagcctacgaccagcagctcaaagcgggtgacaatccgtacctgcggtataatcacgccgacgccgagtttcaggagcgtctgcaagaagatacgtcttttgggggcaacctcgggcgagcagtcttccaggccaagaagcgggttctcgaacctctcggtctggttgaggaaggcgctaagacggctcctggaaagaagagactggtagagcagtcgccacaagagccagactcctcctcgggcatcggcaagacaggccagcagcccgctaaaaagagactcaattttggtcagactggcgactcagagtcagtccccgacccacaacctctcggagaacctccagcagccccctcaggtctgggacctaatacaatggcttcaggcggtggcgctccaatggcagacaataacgaaggcgccgacggagtgggtaattcctcgggaaattggcattgcgattccacatggctgggggacagagtcatcaccaccagcacccgaacctgggccctgcccacctacaacaaccacctctacaagcaaatctccaacggcacctcgggaggaagcaccaacgacaacacctattttggctacagcaccccctgggggtattttgacttcaacagattccactgtcacttttcaccacgtgactggcaacgactcatcaacaacaattggggattccggcccaaaagactcaacttcaagctgttcaacatccaggtcaaggaagtcacgacgaacgaaggcaccaagaccatcgccaataatctcaccagcaccgtgcaggtctttacggactcggagtaccagttaccgtacgtgctaggatccgctcaccagggatgtctgcctccgttcccggcggacgtcttcacggttcctcagtacggctatttaactttaaacaatggaagccaagccctgggacgttcctccttctactgtctggagtatttcccatcgcagatgctgagaaccggcaacaactttcagttcagctacaccttcgaggacgtgcctttccacagcagctacgcgcacagccagagcctggacaggctgatgaatcccctcatcgaccagtacctgtactacctggtcagaacgcaaacgactggaactggagggacgcagactctggcattcagccaagcgggtcctagctcaatggccaaccaggctagaaattgggtgcccggaccttgctaccggcagcagcgcgtctccacgacaaccaaccagaacaacaacagcaactttgcctggacgggagctgccaagtttaagctgaacggccgagactctctaatgaatccgggcgtggcaatggcttcccacaaggatgacgacgaccgcttcttcccttcgagcggggtcctgatttttggcaagcaaggagccgggaacgatggagtggattacagccaagtgctgattacagatgaggaagaaatcaaggctaccaaccccgtggccacagaagaatatggagcagtggccatcaacaaccaggccgccaatacgcaggcgcagaccggactcgtgcacaaccagggggtgattcccggcatggtgtggcagaatagagacgtgtacctgcagggtcccatctgggccaaaattcctcacacggacggcaactttcacccgtctcccctgatgggcggctttggactgaagcacccgcctcctcaaattctcatcaagaacacaccggttccagcggacccgccgcttaccttcaaccaggccaagctgaactctttcatcacgcagtacagcaccggacaggtcagcgtggaaatcgagtgggagctgcagaaagaaaacagcaaacgctggaatccagagattcaatacacttccaactactacaaatctacaaatgtggactttgctgtcaacacggaaggagtttatagcgagcctcgccccattggcacccgttacctcacccgcaacctgtaattacatgttaatcaataaaccggttaattcgtttcagttgaactttggtctctgcgaagggcgaattc

SEQ ID NO: 75 - protein, 736 aa, Adeno-associated virus
MAADGYLPDWLEDNLSEGIREWWDLKPGAPKPKANQQKQDDGRGLVLPGYKYLGPFNGLDKGEPVNAADAAALEHDKAYDQQLKAGDNPYLRYNHADAEFQERLQEDTSFGGNLGRAVFQAKKRVLEPLGLVEEGAKTAPGKKRLVEQSPQEPDSSSGIGKTGQQPAKKRLNFGQTGDSESVPDPQPLGEPPAAPSGLGPNTMASGGGAPMADNNEGADGVGNSSGNWHCDSTWLGDRVITTSTRTWALPTYNNHLYKQISNGTSGGSTNDNTYFGYSTPWGYFDFNRFHCHFSPRDWQRLINNNWGFRPKRLNFKLFNIQVKEVTTNEGTKTIANNLTSTVQVFTDSEYQLPYVLGSAHQGCLPPFPADVFTVPQYGYLTLNNGSQALGRSSFYCLEYFPSQMLRTGNNFQFSYTFEDVPFHSSYAHSQSLDRLMNPLIDQYLYYLVRTQTTGTGGTQTLAFSQAGPSSMANQARNWVPGPCYRQQRVSTTTNQNNNSNFAWTGAAKFKLNGRDSLMNPGVAMASHKDDDDRFFPSSGVLIFGKQGAGNDGVDYSQVLITDEEEIKATNPVATEEYGAVAINNQAANTQAQTGLVHNQGVIPGMVWQNRDVYLQGPIWAKIPHTDGNFHPSPLMGGFGLKHPPPQILIKNTPVPADPPLTFNQAKLNSFITQYSTGQVSVEIEWELQKENSKRWNPEIQYTSNYYKSTNVDFAVNTEGVYSEPRPIGTRYLTRNL

SEQ ID NO: 76 - DNA, 3117 bp, Adeno-associated virus
gaattcgcccttggctgcgtcaactggaccaatgagaactttcccttcaacgattgcgtcgacaagatggtgatctggtgggaggagggcaagatgacggccaaggtcgtggagtccgccaaggccattctcggcggcagcaaggtgcgtgtggaccaaaagtgcaagtcttccgcccagatcgatcccacccccgtgatcgtcacctccaacaccaacatgtgcgccgtgattgacgggaacagcaccaccttcgagcaccagcagccgttgcaggaccggatgttcaaatttgaactcacccgccgtctggagcatgactttggcaaggtgacgaagcaggaagtcaaagagttcttccgctgggcgcaggatcacgtgaccgaggtggcgcatgagttccacgtcagaaagggtggagccaacaagagacccgcccccgatgacgcggatataagcgagcccaagcgggcctgcccctcagtcgcggatccatcgacgtcagacgcggaaggagctccggtggactttgccgacaggtaccaaaacaaatgttctcgtcacgcgggcatgcttcagatgctgtttccctgcaagacatgcgagagaatgaatcagaatttcaacatttgcttcacgcacgggaccagagactgttcagaatgtttccccggcgtgtcagaatctcaaccggtcgtcagaaagaggacgtatcggaaactctgtgcgattcatcatctgctggggcgggctcccgagattgcttgctcggcctgcgatctggtcaacgtggacctggatgactgtgtttctgagcaataaatgacttaaaccaggtatggctgccgatggttatcttccagattggctcgaggacaacctctctgagggcattcgcgagtggtgggacttgaaacctggagccccgaaacccaaagccaaccagcaaaagcaggacgacggccggggtctggtgcttcctggctacaagtacctcggacccttcaacggactcgacaagggggagcccgtcaacgcggcggacgcagcggccctcgagcacgacaaagcctacgaccagcagctcaaagcgggtgacaatccgtacctgcggtataatcacgccgacgccgagtttcaggagcgtctgcaagaagatacgtcttttgggggcaacctcgggcgagcagtcttccaggccaagaagcgggttctcgaacctctcggtctggttgaggaaggcgctaagacggctcctggaaagaagagaccggtagagcagtcgccacaagagccagactcctcctcgggcatcggcaagacaggccagcagcccgctaaaaagagactcaattttggtcagactggcgactcagagtcagtccccgacccacaacctctcggagaacctccagcagccccctcaggtctgggacctaatacaatggcttcaggcggtggcgctccaatggcagacaataacgaaggcgccgacggagtgggtaattcctcgggaaattggcattgcgattccacatggctgggggacagagtcatcaccaccagcacccgaacctgggccctgcccacctacaacaaccacctctacaagcaaatctccaacggcacctcgggaggaagcaccaacgacaacacctattttggctacagcaccccctgggggtattttgacttcaacagattccactgtcacttttcaccacgtgactggcaacgactcatcaacaacaattggggattccggcccaaaagactcaacttcaagctgttcaacatccaggtcaaggaagtcacgacgaacgaaggcaccaagaccatcgccaataatctcaccagcaccgtgcgggtctttacggactcggagtaccagttaccgtacgtgctaggatccgctcaccagggatgtctgcctccgttcccggcggacgtcttcatggttcctcagtacggctatttaactttaaacaatggaagccaagccctgggacgttcctccttctactgtctggagtatttcccatcgcagatgctgagaaccggcaacaactttcagttcagctacaccttcgaggacgtgcctttccacagcagctacgcgcacagccagagcctggacaggctgatgaatcccctcatcgaccagtacctgtactacctggtcagaacgcaaacgactggaactggagggacgcagactctggcattcagccaagcgggtcctagctcaatggccaaccaggctagaaattgggtgcccggaccttgctaccggcagcagcgcgtctccacgacaaccaaccagagcaacaacagcaactttgcctggacgggagctgccaagtttaagctgaacggccgagactctctaatgaatccgggcgtggcaatggcttcccacaaggatgacgacgaccgcttcttcccttcgagcggggtcctgatttttggcaagcaaggagccgggaacgatggagtggattacagccaagtgctgattacagatgaggaagaaatcaaggctaccaaccccgtggccacagaagaatatggagcagtggccatcaacaaccaggccgccaatacgcaggcgcagaccggactcgtgcacaaccagggggtgattcccggcatggtgtggcagaatagagacgtgtacctgcagggtcccatctgggccaaaattcctcacacggacggcaactttcacccgtctcccctgatgggcggctttggactgaagcacccgcctcctcaaattctcatcaagaacacaccggttccagcggacccgccgcttaccttcaaccaggccaagctgaactctttcatcacgcagtacagcaccggacaggtcagcgtggaaatcgagtgggagctgcagaaagaaaacagcaaacgctggaatccagagattcaatacacttccaactactacaaatctacaaatgtggactttgctgtcaacacggaaggagtttatagcgagcctcgccccattggcacccgttacctcacccgcaacctgtaattacatgttaatcaataaaccggttaattcgtttcagttgaactttggtctctgcgaagggcgaattc

SEQ ID NO: 77 - protein, 736 aa, Adeno-associated virus
MAADGYLPDWLEDNLSEGIREWWDLKPGAPKPKANQQKQDDGRGLVLPGYKYLGPFNGLDKGEPVNAADAAALEHDKAYDQQLKAGDNPYLRYNHADAEFQERLQEDTSFGGNLGRAVFQAKKRVLEPLGLVEEGAKTAPGKKRPVEQSPQEPDSSSGIGKTGQQPAKKRLNFGQTGDSESVPDPQPLGEPPAAPSGLGPNTMASGGGAPMADNNEGADGVGNSSGNWHCDSTWLGDRVITTSTRTWALPTYNNHLYKQISNGTSGGSTNDNTYFGYSTPWGYFDFNRFHCHFSPRDWQRLINNNWGFRPKRLNFKLFNIQVKEVTTNEGTKTIANNLTSTVRVFTDSEYQLPYVLGSAHQGCLPPFPADVFMVPQYGYLTLNNGSQALGRSSFYCLEYFPSQMLRTGNNFQFSYTFEDVPFHSSYAHSQSLDRLMNPLIDQYLYYLVRTQTTGTGGTQTLAFSQAGPSSMANQARNWVPGPCYRQQRVSTTTNQSNNSNFAWTGAAKFKLNGRDSLMNPGVAMASHKDDDDRFFPSSGVLIFGKQGAGNDGVDYSQVLITDEEEIKATNPVATEEYGAVAINNQAANTQAQTGLVHNQGVIPGMVWQNRDVYLQGPIWAKIPHTDGNFHPSPLMGGFGLKHPPPQILIKNTPVPADPPLTFNQAKLNSFITQYSTGQVSVEIEWELQKENSKRWNPEIQYTSNYYKSTNVDFAVNTEGVYSEPRPIGTRYLTRNL

SEQ ID NO: 78 - DNA, 3121 bp, Adeno-associated virus
gaattcgcccttctacggctgcgtcaactggaccaatgagaactttcccttcaacgattgcgtcgacaagatggtgatctggtgggaggagggcaagatgacggccaaggtcgtggagtccgccaaggccattctcggcggcagcaaggtgcgtgtggaccaaaagtgcaagtcttccgcccagatcgatcccacccccgtgatcgtcacctccaacaccaacatgtgcgccgtgattgacgggaacagcaccaccttcgagcaccagcagccgttgcaggaccggatgttcaaatttgaactcacccgccgtctggagcatgactttggcaaggtgacgaagcaggaagtcaaagagttcttccgctgggcgcaggatcacgtgaccgaggtggcgcatgagttccacgtcagaaagggtggcgccaacaagagacccgcccccgatgacgcggatataagcgagcccaagcgggcctgcccctcagtcgcggatccatcgacgtcagacgcggaaggagctccggtggactttgccgacaggtaccaaaacaaatgttctcgtcacgcgggcatgcttcagatgctgtttccctgcaagacatgcgagagaatgaatcagaatttcaacatttgcttcacgcacgggaccagagactgttcagaatgtttccccggcgtgtcagaatctcaaccggtcgtcagaaagaggacgtatcggaaactctgtgcgattcatcatctgctggggcgggctcccgagattgcttgctcggcctgcgatctggtcaacgtggacctggatgactgtgtttctgagcaataaatgacttaaaccaggtatggctgccgatggttatcttccagattggctcgaggacaacctctctgagggcattcgcgagtggtgggacttgaaacctggagccccgaaacccaaagccaaccagcaaaagcaggacgacggccggggtctggtgcttcctggctacaagtacctcggacccttcaacggactcgacaagggggagcccgtcaacgcggcggacgcagcggccctcgagcacgacaaagcctacgaccagcagctcaaagcgggtgacaatccgtacctgcggtataatcacgccgacgccgagtttcaggagcgtctgcaagaagatacgtcctttgggggcaacctcgggcgagcagtcttccaggccaagaagcgggttctcgaacctctcggtctggttgaggaaggcgctaagacggctcctggaaagaagagaccggtagagcagtcgccacaagagccagactcctcctcgggcatcggcaagacaggccagcagcccgctaaaaagagactcaattttggtcagactggcgactcagagtcagtccccgacccacaacctctcggagaacctccagcagccccctcaggtctgggacctaatacaatggcttcaggcggtggcgctccaatggcagacaataacgaaggcgccgacggagtgggtaattcctcgggaaattggcattgcgattccacatggctgggggacagagtcatcaccaccagcacccgaacctgggccctgcccacctacaacaaccacctctacaagcaaatctccaacggcacctcgggaggaagcaccaacgacaacacctattttggctacagcaccccctgggggtattttgacttcaacagattccactgtcacttttcaccacgtgactggcaacgactcatcaacaacaattggggattccggcccaaaagactcaacttcaagctgttcaacatccaggtcaaggaagtcacgacgaacgaaggcaccaagaccatcgccaataatctcaccagcaccgtgcaggtctttacggacttggagtaccagttaccgtacgtgctaggatccgctcaccagggatgtctgcctccgttcccggcggacgtcttcatggttcctcagtacggctatttaactttaaacaatggaagccaagccctgggacgttcctccttctactgtctggagtatttcccatcgcagatgccgagaaccggcaacaactttcagttcagctacaccttcgaggacgtgcctttccacagcagctacgcgcacagccagagcctggacaggctgatgaatcccctcatcgaccagtacctgtactacctggtcagaacgcaaacgactggaactggagggacgcagactctggcattcagccaagcgggtcctagctcaatggccaaccaggctagaaattgggtgcccggaccttgctaccggcagcagcgcgtctccacgacaaccaaccagaacaacaacagcaactttgcctggacgggagctgccaagtttaagctgaacggccgagactctctaatgaatccgggcgtggcaatggcttcccacaaggatgacgacgaccgcttcttcccttcgagcggggtcctgatttttggcaagcaaggagccgggaacgatggagtggattacagccaagtgctgattacagatgaggaagaaatcaaggctaccaaccccgtggccacagaagaatatggagcagtggccatcaacaaccaggccgccaatacgcaggcgcagaccggactcgtgcacaaccagggggtgattcccggcatggtgtggcagaatagagacgtgtacctgcagggtcccatctgggccaaaattcctcacacggacggcaactttcacccgtctcccctgatgggcggctttggactgaagcacccgcctcctcaaattctcatcaagaacacaccggttccagcggacccgccgcttaccttcaaccaggccaagctgaactctttcatcacgcagtacagcaccggacaggtcagcgtggaaatcgagtgggagctgcagaaagaaaacagcaaacgctggaatccagagattcaatacacttccaactactacaaatctacaaatgtggactttgctgtcaacacggaaggagtttatagcgagcctcgccccattggcacccgttacctcacccgcaacctgtaattacatgttaatcaataaaccggttaattcgtttcagttgaactttggtctctgcgaagggcgaattc

SEQ ID NO: 79 - protein, 736 aa, Adeno-associated virus
MAADGYLPDWLEDNLSEGIREWWDLKPGAPKPKANQQKQDDGRGLVLPGYKYLGPFNGLDKGEPVNAADAAALEHDKAYDQQLKAGDNPYLRYNHADAEFQERLQEDTSFGGNLGRAVFQAKKRVLEPLGLVEEGAKTAPGKKRPVEQSPQEPDSSSGIGKTGQQPAKKRLNFGQTGDSESVPDPQPLGEPPAAPSGLGPNTMASGGGAPMADNNEGADGVGNSSGNWHCDSTWLGDRVITTSTRTWALPTYNNHLYKQISNGTSGGSTNDNTYFGYSTPWGYFDFNRFHCHFSPRDWQRLINNNWGFRPKRLNFKLFNIQVKEVTTNEGTKTIANNLTSTVQVFTDLEYQLPYVLGSAHQGCLPPFPADVFMVPQYGYLTLNNGSQALGRSSFYCLEYFPSQMPRTGNNFQFSYTFEDVPFHSSYAHSQSLDRLMNPLIDQYLYYLVRTQTTGTGGTQTLAFSQAGPSSMANQARNWVPGPCYRQQRVSTTTNQNNNSNFAWTGAAKFKLNGRDSLMNPGVAMASHKDDDDRFFPSSGVLIFGKQGAGNDGVDYSQVLITDEEEIKATNPVATEEYGAVAINNQAANTQAQTGLVHNQGVIPGMVWQNRDVYLQGPIWAKIPHTDGNFHPSPLMGGFGLKHPPPQILIKNTPVPADPPLTFNQAKLNSFITQYSTGQVSVEIEWELQKENSKRWNPEIQYTSNYYKSTNVDFAVNTEGVYSEPRPIGTRYLTRNL

SEQ ID NO: 80 - DNA, 3122 bp, Adeno-associated virus
gaattcgccctttctacggctgcgtcaactggaccaatgagaactttcccttcaacgattgcgtcgacaagatggtgatctggtgggaggagggcaagatgacggccaaggtcgtggagtccgccaaggccattctcggcggcagcaaggtgcgtgtggaccaaaagtgcaagtcttccgcccagatcgatcccacccccgtgatcgtcacctccaacaccaacatgtgcgccgtgattgacgggaacagcaccaccttcgagcaccagcagccgttgcaggaccggatgttcaaatttgaactcacccgccgtctggagcatgactttggcaaggtgacgaagcaggaagtcaaagggttcttccgctgggcgcaggatcacgtgaccgaggtggcgcatgagttccacgtgcgagcccaagcgggcctgcccctcagtcgcggatccatcgacgtcagaccagaaagggtggagccaacaagagacccgcccccgatgacgcggatataagcggaaggagctccggtggactttgccgacaggtaccaaaacaaatgttctcgtcacgcgggcatgcttcagatgctgtttccctgcaagacatgcgagagaatgaatcagaatttcaacatttgcttcacgcacgggaccagagactgttcagaatgtttccccggcgtgtcagaatctcaaccggtcgtcagaaagaggacgtatcggaaactctgtgcgattcatcatctgctggggcgggctcccgagattgcttgctcggcctgcgatctggtcaacgtggacctggatgactgtgtttctgagcaataaatgacttaaaccaggtatggctgccgatggttatcttccagattggctcgaggacaacctctctgagggcattcgcgagtggtgggacttgaaacctggagccccgaaacccaaagccaaccagcaaaagcaggacgacggccggggtctggtgcttcctggctacaagtacctcggacccttcaacggactcgacaagggggagcccgtcaacgcggcggacgcagcggccctcgagcacgacaaagcctacgaccagcagctcaaagcgggtgacaatccgtacctgcggtataatcacgccgacgccgagtttcaggagcgtctgcaagaagatacgtcttttgggggcaacctcgggcgagcagtcttccaggccaagaagcgggttctcgaacctctcggtctggttgaggaaggcgctaagacggctcctggaaagaagagaccggtagagcagtcgccacaagagccagactcctcctcgggcatcggcaagacaggccagcagcccgctaaaaagagactcaattttggtcagactggcgactcagagtcagtccccgacccacaacctctcggagaacctccagcagccccctcaggtctgggacctaatacaatggcttcaggcggtggcgctccaatggcagacaataacgaaggcgccgacggagtgggtaattcctcgggaaattggcattgcgattccacatggctgggggacagagtcatcaccaccagcacccgaacctgggccctgcccacctacaacaaccacctctacaagcaaatctccaacggcacctcgggaggaagcaccaacgacaacacctattttggctacagcaccccctgggggtattttgacttcaacagattccactgtcacttttcaccacgtgactggcaacgactcatcaacaacaattggggattccggcccaaaagactcaacttcaagctgttcaacatccaggtcaaggaagtcacgacgaacgaaggcaccaagaccatcgccaataatctcaccagcaccgtgcaggtctttacggactcggagtaccagttaccgtacgtgctaggatccgctcaccagggatgtctgcctccgttcccggcggacgtcttcatggttcctcagtacggctatttaactttaaacaatggaagccaagccctgggacgttcctccttctactgtctggagtatttcccatcgcagatgctgagaaccggcaacaactttcagttcagctacaccttcgaggacgtgcctttccacagcagctacgcgcacagccagagcctggacaggctgatgaatcccctcatcgaccagtacctgtactacctggtcagaacgcaaacgactggaactggagggacgcagactctggcattcagccaagcgggtcctagctcaatggccaaccaggctagaaattgggtgcccggaccttgctaccggcagcagcgcgtctccacgacaaccaaccagaacaacaacagcaactttgcctggacgggagctgccaagtttaagctgaacggccgagactctctaatgaatccgggcgtggcaatggcttcccacaaggatgacgacgaccgcttcttcccttcgagcggggtcctgatttttggcaagcaaggagccgggaacgatggagtggattacagccaagtgctgattacagatgaggaagaaatcaaggctaccaaccccgtggccacagaagaatatggagcagtggccatcaacaaccaggccgccaatacgcaggcgcagaccggactcgtgcacaaccagggggtgattcccggcatggtgtggcagaatagagacgtgtacctgcagggtcccatctgggccaaaattcctcacacggacggcaactttcacccgtctcccctgatgggcggctttggactgaagcacccgcctcctcaaattctcatcaagaacacaccggttccagcggacccgccgcttaccttcaaccaggccaagctgaactctttcatcacgcagtacagcaccggacaggtcagcgtggaaatcgagtgggagctgcagaaagaaaacagcaaacgctggaatccagagattcaatacacttccaactactacaaatctacaaatgtggactttgctgtcaacacggagggggtttatagcgagcctcgccccattggcacccgttacctcacccgcaacctgtaattacatgttaatcaataaaccggttaattcgtttcagttgaactttggtctctgcgaagggcgaattc

SEQ ID NO: 81 - protein, 736 aa, Adeno-associated virus
MAADGYLPDWLEDNLSEGIREWWDLKPGAPKPKANQQKQDDGRGLVLPGYKYLGPFNGLDKGEPVNAADAAALEHDKAYDQQLKAGDNPYLRYNHADAEFQERLQEDTSFGGNLGRAVFQAKKRVLEPLGLVEEGAKTAPGKKRPVEQSPQEPDSSSGIGKTGQQPAKKRLNFGQTGDSESVPDPQPLGEPPAAPSGLGPNTMASGGGAPMADNNEGADGVGNSSGNWHCDSTWLGDRVITTSTRTWALPTYNNHLYKQISNGTSGGSTNDNTYFGYSTPWGYFDFNRFHCHFSPRDWQRLINNNWGFRPKRLNFKLFNIQVKEVTTNEGTKTIANNLTSTVQVFTDSEYQLPYVLGSAHQGCLPPFPADVFMVPQYGYLTLNNGSQALGRSSFYCLEYFPSQMLRTGNNFQFSYTFEDVPFHSSYAHSQSLDRLMNPLIDQYLYYLVRTQTTGTGGTQTLAFSQAGPSSMANQARNWVPGPCYRQQRVSTTTNQNNNSNFAWTGAAKFKLNGRDSLMNPGVAMASHKDDDDRFFPSSGVLIFGKQGAGNDGVDYSQVLITDEEEIKATNPVATEEYGAVAINNQAANTQAQTGLVHNQGVIPGMVWQNRDVYLQGPIWAKIPHTDGNFHPSPLMGGFGLKHPPPQILIKNTPVPADPPLTFNQAKLNSFITQYSTGQVSVEIEWELQKENSKRWNPEIQYTSNYYKSTNVDFAVNTEGVYSEPRPIGTRYLTRNL

SEQ ID NO: 82 - DNA, 2370 bp, Adeno-associated virus
gaattcgccctttctacggctgcgtcaactggaccaatgagaactttcccttcaacgattgcgtcgacaagatggtgatctggtgggaggagggcaagatgacggccaaggtcgtggagtccgccaaggccattctcggcggcagcaaggtgcgcgtggaccaaaagtgcaagtcgtccgcccagatcgaccccacccccgtgatcgtcacctccaacaccaacatgtgcgccgtgattgacgggaacagcaccaccttcgagcaccagcagccgttgcaggaccggatgttcaagttcgaactcacccgccgtctggagcacgactttggcaaggtgaccaagcaggaagtcaaagagttcttccgctgggcgcaggatcacgtgaccgaggtggcgcatgagttctacgtcagaaagggcggagccagcaaaagacccgcccccgatgacgcggatataagcgagcccaagcgggcctgcccctcagtcgcggatccatcgacgtcagacgcggaaggagctccggtggactttgccgacaggtaccaaaacaaatgttctcgtcacgcgggcatgcttcagacgctgtttccctgcaaaacgtgcgagagaatgaatcagaatttcaacatttgcttcacgcacggggtcagagactgctcagaatgtttccccggtgcatcagaatctcaaccggtcgtcagaaaaaaaacgtatcagaaactgtgtgccattcatcatctgctggggcgggcacccgagattgcttgctcggcctgcgatctggtcaacgtggacctggacgactgtgtttctgagcaataaatgacttaaaccaggtatggctgccgatggttatcttccagattggcttgaggacaacctctctgagggcattcgcgagtggtgggacctgaaacctggagccccgaaacccaaagccaaccagcaaaagcaggacgacggccggggtctggtgcttcctggctacaagtacctcggacccttcaacggactcgacaagggggagcccgtcaacgcggcggacgcagcggccctcgagcacgacaaggcctacgaccagcagctcaaagcgggtgacaatccgtacctgcggtataaccacgccgacgccgagtttcaggagcgtctgcaagaagatacgtcttttgggggcaacctcgggcgagcagtcttccaggccaagaagcgggttctcgaacctctcggtctggttgaggaaggcgctaagacggctcctggaaagaagagaccggtagagccatcacctcagcgttcccccgactcctccacgggcatcggcaagaaaggccaccagcccgcgagaaagagactgaactttgggcagactggcgactcggagtcagtccccgaccctcaaccaatcggagaaccaccagcaggcccctctggtctgggatctggtacaatggctgcaggcggtggcgctccaatggcagacaataacgaaggcgccgacggagtgggtagttcctcaggaaattggcattgcgattccacatggctgggcgacagagtcatcaccaccagcacccgaacctgggccctgcccacctacaacaaccatctctacaagcaaatctccaacgggacatcgggaggaagcactaacgacaacacctactttggctacagcaccccctgggggtattttgacttcaacagattccactgccacttctcaccacgtgactggcagcgactcatcaacaataactggggattccggcccaagagactcaacttcaagctcttcaacatccaggtcaaggaggtcacgcagaatgaaggcaccaagaccatcgccaataaccttaccagcacgattcaggtgtttacggactcggaataccagctcccgtacgtcctcggctctgcgcaccagggctgcctccctccgttcccggcggacgtcttcatgattcctcagtacgggtatctgaccctaaacaatggcagtcaggctgtgggccgttcctccttctactgcctggaatacttcccttctcaaatgctgaggacgggcaacaactttgaattcagctacaccttcgaggacgtgcctttccacagcagctacgcgcacagccagagcctggaccggctgatgaaccctctcatcgaccagtacctgtattacttatccagaactcagtccacaggaggaactcaaggtactcagcaattgttattttctcaagccgggcccgcaaacatgtyggctcaggccaagaactggctacctggaccgtgttaccgtcagcaacgagtttccacgacactgtcgcaaaacaacaacagcaattttgctggaccggtgccacca

SEQ ID NO: 83 - protein, 738 aa, Adeno-associated virus; identical to SEQ ID NO: 73

SEQ ID NO: 84 - DNA, 2205 bp, Adeno-associated virus
atgactgacggttaccttccagattggctagaggacaacctctctgaaggcgttcgagagtggtgggcgctgcaacctggagcccctaaacccaaggcaaatcaacaacatcaggacaacgctcggggtcttgtgcttccgggttacaaatacctcggacccggcaacggactcgacaagggggaacccgtcaacgcagcggacgcggcagccctcgagcacgacaaggcctacgaccagcagctcaaggccggtgacaacccctacctcaagtacaaccacgccgacgcggagttccagcagcggcttcagggcgacacatcgtttgggggcaacctcggcagagcagtcttccaggccaaaaagagggttcttgaacctcttggtctggttgagcaagcgggtgagacggctcctggaaagaagagaccgttgattgaatccccccagcagcccgactcctccacgggtatcggcaaaaaaggcaagcagccggctaaaaagaagctcgttttcgaagacgaaactggagcaggcgacggaccccctgagggatcaacttccggagccatgtctgatgacagtgagatgcgtgcagcagctggcggagctgcagtcgagggcggacaaggtgccgatggagtgggtaatgcctcgggtgattggcattgcgattccacctggtctgagggccacgtcacgaccaccagcaccagaacctgggtcttgcccacctacaacaaccacctctacaagcgactcggagagagcctgcagtccaacacctacaacggattctccaccccctggggatactttgacttcaaccgcttccactgccacttctcaccacgtgactggcagcgactcatcaacaacaactggggcatgcgacccaaagccatgcgggtcaaaatcttcaacatccaggtcaaggaggtcacgacgtcgaacggcgagacaacggtggctaataaccttaccagcacggttcagatctttgcggactcgtcgtacgaactgccgtacgtgatggatgcgggtcaagagggcagcctgcctccttttcccaacgacgtctttatggtgccccagtacggctactgtggactggtgaccggcaacacttcgcagcaacagactgacagaaatgccttctactgcctggagtactttccttcgcagatgctgcggactggcaacaactttgaaattacgtacagttttgagaaggtgcctttccactcgatgtacgcgcacagccagagcctggaccggctgatgaaccctctcatcgaccagtacctgtggggactgcaatcgaccaccaccggaaccaccctgaatgccgggactgccaccaccaactttaccaagctgcggcctaccaacttttccaactttaaaaagaactggctgcccgggccttcaatcaagcagcagggcttctcaaagactgccaatcaaaactacaagatccctgccaccgggtcagacagtctcatcaaatacgagacgcacagcactctggacggaagatggagtgccctgacccccggacctccaatggccacggctggacctgcggacagcaagttcagcaacagccagctcatctttgcggggcctaaacagaacggcaacacggccaccgtacccgggactctgatcttcacctctgaggaggagctggcagccaccaacgccaccgatacggacatgtggggcaacctacctggcggtgaccagagcaacagcaacctgccgaccgtggacagactgacagccttgggagccgtgcctggaatggtctggcaaaacagagacatttactaccagggtcccatttgggccaagattcctcataccgatggacactttcacccctcaccgctgattggtgggtttgggctgaaacacccgcctcctcaaatttttatcaagaacaccccggtacctgcgaatcctgcaacgaccttcagctctactccggtaaactccttcattactcagtacagcactggccaggtgtcggtgcagattgactgggagatccagaaggagcggtccaaacgctggaaccccgaggtccagtttacctccaactacggacagcaaaactctctgttgtgggctcccgatgcggctgggaaatacactgagcctagggctatcggtacccgctacctcacccaccacctgtaa

SEQ ID NO: 85 - protein, 734 aa, Adeno-associated virus; identical to SEQ ID NO: 57

SEQ ID NO: 86 - DNA, 3128 bp, Adeno-associated virus
gaattcgccctttctacggctgcgtcaactggaccaatgagaactttcccttcaacgattgcgtcgacaagatgttgatctggtgggaggagggcaagatgacggccaaggtcgtggagtccgccaaggccattctcggcggcagcaaagtgcgcgtggaccaaaagtgcaagccgtccgcccagatcgaccccacccccgtgatcgtcacctccaacaccaacatgtgcgccgtgattgacgggaacagcaccaccttcgagcaccagcagccgttgcgggaccggatgttcaagtttgaactcacccgccgtctggagcacgactttggcaaggtgacaaagcaggaagtcagagagttcttccgctgggcgcaggatcacgtgaccgaggtggcgcacgagttctacgtcagaaagggtggagccaacaagagacccgcccccgatgacgcggataaaagcgagcccaagcgggcctgcccctcagtcgcggatccatcgacgtcagacgcggaaggagctccggtggactttgccgacaggtaccaaaacaaatgttctcgtcacgcgggcatgcttcagatgctgtttccctgcaaaacatgcgagagaatgaatcagaatttcaacatttgcttcacgcacgggaccagagactgttcagaatgtttccccggcgtgtcagaatctcaaccggtcgtcagaaaaaagacgtatcggaaactctgtgcgattcatcatctgctggggcgggcacccgagattgcttgctcggcctgcgatctggtcaacgtggacctagatgactgtgtttctgagcaataaatgacttaaaccaggtatggctgccgatggttatcttccagattggctcgaggacaacctctctgagggcattcgcgagtggtgggacttgaaacctggagccccgaaacccaaagccaaccagcaaaagcaggacgacggccggggtctggtgcttcctggctacaagtacctcggacccttcaacggactcgacaagggggagcccgtcaacgcggcggacgcagcggccctcgagcacgacaaggcctacgaccagcagctcaaagcgggtgacaatccgtacctgcggtataaccacgccgacgccgagtttcaggagcgtctgcaagaagatacgtcttttgggggcaacctcgggcgagcagtcttccaggccaagaagcgggttctcgaacctctcggtctggttgaggaaggcgctaagacggctcctggaaagaagagaccggtagagccatcaccccagcgttctccagactcctctacgggcatcggcaagaaaggccagcagcccgcgaaaaagagactcaactttgggcagactggcgactcagagtcagtgcccgaccctcaaccaatcggagaaccccccgcaggcccctctggtctgggatctggtacaatggctgcaggcggtggcgctccaatggcagacaataacgaaggcgccgacggagtgggtagttcctcaggaaattggcattgcgattccacatggctgggcgacagagtcatcaccaccagcacccgaacctgggccctccccacctacaacaaccacctctacaagcaaatctccaacgggacttcgggaggaagcaccaacgacaacacctacttcggctacagcaccccctgggggtattttgactttaacagattccactgccacttctcaccacgtgactggcagcgactcatcaacaacaactggggattccggcccaagagactcaacttcaagctcttcaacatccaggtcaaggaggtcacgcagaatgaaggcaccaagaccatcgccaataaccttaccagcacgattcaggtctttacggactcggaataccagctcccgtacgtcctcggctctgcgcaccagggctgcctgcctccgttcccggcggacgtcttcatgattcctcagtacgggtacctgactctgaacaatggcagtcaggccgtgggccgttcctccttctactgcctggagtactttccttctcaaatgctgagaacgggcaacaactttgagttcagctaccagtttgaggacgtgccttttcacagcagctacgcgcacagccaaagcctggaccggctgatgaaccccctcatcgaccagtacctgtactacctgtctcggactcagtccacgggaggtaccgcaggaactcagcagttgctattttctcaggccgggcctaataacatgtcggctcaggccaaaaactggctacccgggccctgctaccggcagcaacgcgtctccacgacactgtcgcaaaataacaacagcaactgtaaatcccggtgtcgctatggcaacccacaaggacgacgaagagcgattttgcctggaccggtgccaccaagtatcatctgaatggcagagactctctgttttccgtccagcggagtcttaatgtttgggaaacagggagctggaaaagacaacgtggactatagcagcgttatgctaaccagtgaggaagaaattaaaaccaccaacccagtggccacggaacagtacggcgtggtggccgataacctgcaacagcaaaacgccgctcctattgtaggggccgtcaacagtcaaggagccttacctggcatggtctggcagaaccgggacgtgtacctgcagggtcctatctgggccaagattcctcacacggacggaaactttcatccctcgccgctgatgggaggctttggactgaaacacccgcctcctcagatcctgattaagaatacacctgttcccgcggatcctccaactaccttcagtcaagctaagctggcgtcgttcatcacgcagtacagcaccggacaggtcagcgtggaaattgaatgggagctgcagaaagaaaacagcaaacgctggaacccagagattcaatacacttccaactactacaaatctacaaatgtggacttcgctgttaacacagatggcacttattctgagcctcgccccattggcacccgttacctcacccgtaatctgtaattgctcgttaatcaataaaccggttgattcgtttcagttgaactttggtctctgcgaagggcgaattc

SEQ ID NO: 87 - protein, 738 aa, Adeno-associated virus; identical to SEQ ID NO: 7

SEQ ID NO: 88 - DNA, 3128 bp, Adeno-associated virus
gaattcgccctttctacggctgcgtcaactggaccaatgagaactttcccttcaacgattgcgtcgacaagatggtgatctggtgggaggagggcaagatgacggccaaggtcgtggagtccgccaaggccattctcggcggcagcaaagtgcgcgtggaccaaaagtgcaagtcgtccgcccagatcgaccccacccccgtgatcgtcacctccaacaccaacatgtgcgccgtgattgacgggaacagcaccaccttcgagcaccagcagccgttgcaggaccggatgttcaagtttgaactcacccgccgtctggagcacgactttggcaaggtgacaaagcaggaagtcagagagttcttccgctgggcgcaggatcacgtgaccgaggtggcgcacgagttctacgtcagaaagggtggagccaacaagagacccgcccccgatgacgcggataaaagcgagcccaagcgggcctgcccctcagtcgcggatccatcgacgtcagacgcggaaggagctccggtggactttgccgacaggtaccaaaacaaatgttctcgtcacgcgggcatgcttcagatgctgtttccctgcaaaacatgcgagagaatgaatcagaatttcaacatttgcttcacgcacgggaccagagactgttcagaatgtttccccggcgtgtcagaatctcaaccggttgtcagaaaaaagacgtatcggaaactctgtgcgattcatcatctgctggggcgggcacccgagattgcttgctcggcctgcgatctggtcaacgtggacctagatgactgtgtttctgagcaataaatgacttaaaccaggtatggctgccgatggttatcttccagattggctcgaggacaacctctctgagggcattcgcgagtggtgggacttgaaacctggagccccgaaacccaaagccaaccagcaaaagcaggacgacggccggggtctggtgcttcctggctacaagtacctcggacccttcaacggactcgacaagggggagcccgtcaacgcggcggacgcagcggccctcgagcacgacaaggcctacgaccagcagctcaaagcgggtgacaatccgtacctgcggtataaccacgccgacgccgagtttcaggagcgtctgcaagaagatacgtcttttgggggcaacctcgggcgagcagtcttccaggccaagaagcgggttctcgaacctctcggtctggttgaggaaggcgctaagacggctcctggaaagaagagaccggtagagccatcaccccagcgttctccagactcctctacgggcatcggcaagaaaggccagcagcccgcgaaaaagagactcaactttgggcagactggcgactcagagtcagtgcccgaccctcaaccaatcggagaaccccccgcaggcccctctggtctgggatctggtacaatggctgcaggcggtggcgctccaatggcagacaataacgaaggcgccgacggagtgggtagttcctcaggaaattggcattgcgattccacatggctgggcgacagagtcatcaccaccagcacccgaacctgggccctccccacctacaacaaccacctctacaagcaaatctccaacgggacttcgggaggaagcaccaacgacaacacctacttcggctacagcaccccctgggggtattttgactttaacagattccactgccacttctcaccacgtgactggcagcgactcatcaacaacaactggggattccggcccaagagacccaacttcaagctcttcaacatccaggtcaaggaggtcacgcagaatgaaggcaccaagaccatcgccaataaccttaccagcacgattcaggtctttacggactcggaataccagctcccgtacgtcctcggctctgcgcaccagggctgcctgcctccgttcccggcggacgtcttcatgattcctcagtacgggtacctgactctgaacaatggcagtcaggccgtgggccgttcctccttctactgcctggagtactttccttctcaaatgctgagaacgggcaacaactttgagttcagctaccagtttgaggacgtgccttttcacagcagctacgcgcacagccaaagcctggaccggctgatgaaccccctcatcgaccagtacctgtactacctgtctcggactcagtccacgggaggtaccgcaggaactcagcagttgctattttctcaggccgggcctaataacatgtcggctcaggccaaaaactggctacccgggccctgctaccggcagcaacgcgtctccacgacactgtcgcaaaataacaacagcaactttgcctggaccggtgccaccaagtatcatctgaatggcagagactctctggtaaatcccggtgtcgctatggcaacccacaaggacgacgaagagcgattttttccgtccagcggagtcttaatgtttgggaaacagggagctggaaaagacaacgtggactatagcagcgttatgctaaccagtgaggaagaaattaaaaccaccaacccagtggccacagaacagtacggcgtggtggccgataacctgcaacagcaaaacgccgctcctattgtaggggccgtcaacagtcaaggagccttacctggcatggtctggcagaaccgggacgtgtacctgcagggtcctatctgggccaagattcctcacacggacggaaactttcatccctcgccgctgatgggaggctttggactgaaacacccgcctcctcagatcctgattaagaatacacctgttcccgcggatcctccaactaccttcagtcaagctaagctggcgtcgttcatcacgcagtacagcaccggacaggtcagcgtggaaattgaatgggagctgcagaaagaaaacagcaaacgctggaacccagagattcaatacacttccaactactacaaatctacaaatgtggactttgctgttaacacagatggcacttattctgagcctcgccccattggcacccgttacctcacccgtaatctgtaattgcttgttaatcaataaaccggttgattcgtttcagttgaactttggtctctgcgaagggcgaattc

SEQ ID NO: 89 - protein, 738 aa, Adeno-associated virus
MAADGYLPDWLEDNLSEGIREWWDLKPGAPKPKANQQKQDDGRGLVLPGYKYLGPFNGLDKGEPVNAADAAALEHDKAYDQQLKAGDNPYLRYNHADAEFQERLQEDTSFGGNLGRAVFQAKKRVLEPLGLVEEGAKTAPGKKRPVEPSPQRSPDSSTGIGKKGQQPAKKRLNFGQTGDSESVPDPQPIGEPPAGPSGLGSGTMAAGGGAPMADNNEGADGVGSSSGNWHCDSTWLGDRVITTSTRTWALPTYNNHLYKQISNGTSGGSTNDNTYFGYSTPWGYFDFNRFHCHFSPRDWQRLINNNWGFRPKRPNFKLFNIQVKEVTQNEGTKTIANNLTSTIQVFTDSEYQLPYVLGSAHQGCLPPFPADVFMIPQYGYLTLNNGSQAVGRSSFYCLEYFPSQMLRTGNNFEFSYQFEDVPFHSSYAHSQSLDRLMNPLIDQYLYYLSRTQSTGGTAGTQQLLFSQAGPNNMSAQAKNWLPGPCYRQQRVSTTLSQNNNSNFAWTGATKYHLNGRDSLVNPGVAMATHKDDEERFFPSSGVLMFGKQGAGKDNVDYSSVMLTSEEEIKTTNPVATEQYGVVADNLQQQNAAPIVGAVNSQGALPGMVWQNRDVYLQGPIWAKIPHTDGNFHPSPLMGGFGLKHPPPQILIKNTPVPADPPTTFSQAKLASFITQYSTGQVSVEIEWELQKENSKRWNPEIQYTSNYYKSTNVDFAVNTDGTYSEPRPIGTRYLTRNL

SEQ ID NO: 90 - protein, 738 aa, Adeno-associated virus
MAADGYLPDWLEDNLSEGIREWWDLKPGAPKPKANQQKQDDGRGLVLPGYKYLGPFNGLDKGEPVNAADAAALEHDKAYDQQLKAGDNPYLRYNHADAEFQERLQEDTSFGGNLGRAVFQAKKRVLEPLGLVEEAAKTAPGKKRPVEPSPQRSPDSSTGIGKKGQQPAKKRLNFGQTGDSESVPDPQPIGEPPAGPSGLGSGTMAAGGGAPMADNNEGADGVGSSSGNWHCDSTWLGDRVITTSTRTWALPTYNNHLYKQISNGTSGGSTNDNTYFGYSTPWGYFDFNRFHCHFSPRDWQRLINNNWGFRPKRLSFKLFNIQVKEVTQNEGTKTIANNLTSTIQVFTDSEYQLPYVLGSAHQGCLPPFPADVFMIPQYGYLTLNNGSQAVGRSSFYCLEYFPSQMLRTGNNFEFSYTFEDVPFHSSYAHSQSLDRLMNPLIDQYLYYLSRTQSTGGTQGTQQLLFSQAGPANMSAQAKNWLPGPCYRQQRVSTTLSQNNNSNFAWTGATKYHLNGRDSLVNPGVAMATHKDDEERFFPSSGVLMFGKQGAGRDNVDYSSVMLTSEEEIKTTNPVATEQYGVVADNLQQTNTGPIVGNVNSQGALPGMVWQNRDVYLQGPIWAKIPHTDGNFHPSPLMGGFGLKHPPPQILIKNTPVPADPPTTFSQAKLASFITQYSTGQVSVEIEWELQKENSKRWNPEIQYTSNYYKSTNVDFAVNTEGTYSEPRPIGTRYLTRNL

SEQ ID NO: 91 - DNA, 2172 bp, Artificial Sequence
  Description of Artificial Sequence: Synthetic polynucleotide
atgtcttttgttgatcaccctccagattggttggaagaagttggtgaaggtcttcgcgagtttttgggccttgaagcgggcccaccgaaaccaaaacccaatcagcagcatcaagatcaagcccgtggtcttgtgctgcctggttataactatctcggacccggaaacggtctcgatcgaggagagcctgtcaacagggcagacgaggtcgcgcgagagcacgacatctcgtacaacgagcagcttgaggcgggagacaacccctacctcaagtacaaccacgcggacgccgagtttcaggagaagctcgccgacgacacatccttcgggggaaacctcggaaaggcagtctttcaggccaagaaaagggttctcgaaccttttggcctggttgaagagggtgctaagacggcccctaccggaaagcggatagacgaccactttccaaaaagaaagaaggctcggaccgaagaggactccaagccttccacctcgtcagacgccgaagctggacccagcggatcccagcagctgcaaatcccagcccaaccagcctcaagtttgggagctgatacaatgtctgcgggaggtggcggcccattgggcgacaataaccaaggtgccgatggagtgggcaatgcctcgggagattggcattgcgattccacgtggatgggggacagagtcgtcaccaagtccacccgaacctgggtgctgcccagctacaacaaccaccagtaccgagagatcaaaagcggctccgtcgacggaagcaacgccaacgcctactttggatacagcaccccctgggggtactttgactttaaccgcttccacagccactggagcccccgagactggcaaagactcatcaacaactactggggcttcagaccccggtccctcagagtcaaaatcttcaacattcaagtcaaagaggtcacggtgcaggactccaccaccaccatcgccaacaacctcacctccaccgtccaagtgtttacggacgacgactaccagctgccctacgtcgtcggcaacgggaccgagggatgcctgccggccttccctccgcaggtctttacgctgccgcagtacggttacgcgacgctgaaccgcgacaacacagaaaatcccaccgagaggagcagcttcttctgcctagagtactttcccagcaagatgctgagaacgggcaacaactttgagtttacctacaactttgaggaggtgcccttccactccagcttcgctcccagtcagaacctgttcaagctggccaacccgctggtggaccagtacttgtaccgcttcgtgagcacaaataacactggcggagtccagttcaacaagaacctggccgggagatacgccaacacctacaaaaactggttcccggggcccatgggccgaacccagggctggaacctgggctccggggtcaaccgcgccagtgtcagcgccttcgccacgaccaataggatggagctcgagggcgcgagttaccaggtgcccccgcagccgaacggcatgaccaacaacctccagggcagcaacacctatgccctggagaacactatgatcttcaacagccagccggcgaacccgggcaccaccgccacgtacctcgagggcaacatgctcatcaccagcgagagcgagacgcagccggtgaaccgcgtggcgtacaacgtcggcgggcagatggccaccaacaaccagagctccaccactgcccccgcgaccggcacgtacaacctccaggaaatcgtgcccggcagcgtgtggatggagagggacgtgtacctccaaggacccatctgggccaagatcccagagacgggggcgcactttcacccctctccggccatgggcggattcggactcaaacacccaccgcccatgatgctcatcaagaacacgcctgtgcccggaaatatcaccagcttctcggacgtgcccgtcagcagcttcatcacccagtacagcaccgggcaggtcaccgtggagatggagtgggagctcaagaaggaaaactccaagaggtggaacccagagatccagtacacaaacaactacaacgacccccagtttgtggactttgccccggacagcaccggggaatacagaaccaccagacctatcggaacccgataccttacccgacccctt

SEQ ID NO: 92 - protein, 720 aa, Adeno-associated virus
MSFVDHPPDWLEEVGEGLREFLGLEAGPPKPKPNQQHQDQARGLVLPGYNYLGPGNGLDRGEPVNRADEVAREHDISYNEQLEAGDNPYLKYNHADAEFQEKLADDTSFGGNLGKAVFQAKKRVLEPFGLVEEGAKTAPTGKRIDDHFPKRKKARTEEDSKPSTSSDAEAGPSGSQQLQIPAQPASSLGADTMSAGGGGPLGDNNQGADGVGNASGDWHCDSTWMGDRVVTKSTRTWVLPSYNNHQYREIKSGSVDGSNANAYFGYSTPWGYFDFNRFHSHWSPRDWQRLINNYWGFRPRSLRVKIFNIQVKEVTVQDSTTTIANNLTSTVQVFTDDDYQLPYVVGNGTEGCLPAFPPQVFTLPQYGYATLNRDNTENPTERSSFFCLEYFPSKMLRTGNNFEFTYNFEEVPFHSSFAPSQNLFKLANPLVDQYLYRFVSTNNTGGVQFNKNLAGRYANTYKNWFPGPMGRTQGWNLGSGVNRASVSAFATTNRMELEGASYQVPPQPNGMTNNLQGSNTYALENTMIFNSQPANPGTTATYLEGNMLITSESETQPVNRVAYNVGGQMATNNQSSTTAPATGTYNLQEIVPGSVWMERDVYLQGPIWAKIPETGAHFHPSPAMGGFGLKHPPPMMLIKNTPVPGNITSFSDVPVSSFITQYSTGQVTVEMEWELKKENSKRWNPEIQYTNNYNDPQFVDFAPDSTGEYRTTRPIGTRYL

SEQ ID NO: 93 - protein, 724 aa, Adeno-associated virus 5
MSFVDHPPDWLEEVGEGLREFLGLEAGPPKPKPNQQHQDQARGLVLPGYNYLGPGNGLDRGEPVNRADEVAREHDISYNEQLEAGDNPYLKYNHADAEFQEKLADDTSFGGNLGKAVFQAKKRVLEPFGLVEEGAKTAPTGKRIDDHFPKRKKARTEEDSKPSTSSDAEAGPSGSQQLQIPAQPASSLGADTMSAGGGGPLGDNNQGADGVGNASGDWHCDSTWMGDRVVTKSTRTWVLPSYNNHQYREIKSGSVDGSNANAYFGYSTPWGYFDFNRFHSHWSPRDWQRLINNYWGFRPRSLRVKIFNIQVKEVTVQDSTTTIANNLTSTVQVFTDDDYQLPYVVGNGTEGCLPAFPPQVFTLPQYGYATLNRDNTENPTERSSFFCLEYFPSKMLRTGNNFEFTYNFEEVPFHSSFAPSQNLFKLANPLVDQYLYRFVSTNNTGGVQFNKNLAGRYANTYKNWFPGPMGRTQGWNLGSGVNRASVSAFATTNRMELEGASYQVPPQPNGMTNNLQGSNTYALENTMIFNSQPANPGTTATYLEGNMLITSESETQPVNRVAYNVGGQMATNNQSSTTAPATGTYNLQEIVPGSVWMERDVYLQGPIWAKIPETGAHFHPSPAMGGFGLKHPPPMMLIKNTPVPGNITSFSDVPVSSFITQYSTGQVTVEMEWELKKENSKRWNPEIQYTNNYNDPQFVDFAPDSTGEYRTTRPIGTRYLTRPL

SEQ ID NO: 94 - protein, 2175 aa, Adeno-associated virus 5
ATGTCTTTTGTTGATCACCCTCCAGATTGGTTGGAAGAAGTTGGTGAAGGTCTTCGCGAGTTTTTGGGCCTTGAAGCGGGCCCACCGAAACCAAAACCCAATCAGCAGCATCAAGATCAAGCCCGTGGTCTTGTGCTGCCTGGTTATAACTATCTCGGACCCGGAAACGGTCTCGATCGAGGAGAGCCTGTCAACAGGGCAGACGAGGTCGCGCGAGAGCACGACATCTCGTACAACGAGCAGCTTGAGGCGGGAGACAACCCCTACCTCAAGTACAACCACGCGGACGCCGAGTTTCAGGAGAAGCTCGCCGACGACACATCCTTCGGGGGAAACCTCGGAAAGGCAGTCTTTCAGGCCAAGAAAAGGGTTCTCGAACCTTTTGGCCTGGTTGAAGAGGGTGCTAAGACGGCCCCTACCGGAAAGCGGATAGACGACCACTTTCCAAAAAGAAAGAAGGCTCGGACCGAAGAGGACTCCAAGCCTTCCACCTCGTCAGACGCCGAAGCTGGACCCAGCGGATCCCAGCAGCTGCAAATCCCAGCCCAACCAGCCTCAAGTTTGGGAGCTGATACAATGTCTGCGGGAGGTGGCGGCCCATTGGGCGACAATAACCAAGGTGCCGATGGAGTGGGCAATGCCTCGGGAGATTGGCATTGCGATTCCACGTGGATGGGGGACAGAGTCGTCACCAAGTCCACCCGAACCTGGGTGCTGCCCAGCTACAACAACCACCAGTACCGAGAGATCAAAAGCGGCTCCGTCGACGGAAGCAACGCCAACGCCTACTTTGGATACAGCACCCCCTGGGGGTACTTTGACTTTAACCGCTTCCACAGCCACTGGAGCCCCCGAGACTGGCAAAGACTCATCAACAACTACTGGGGCTTCAGACCCCGGTCCCTCAGAGTCAAAATCTTCAACATTCAAGTCAAAGAGGTCACGGTGCAGGACTCCACCACCACCATCGCCAACAACCTCACCTCCACCGTCCAAGTGTTTACGGACGACGACTACCAGCTGCCCTACGTCGTCGGCAACGGGACCGAGGGATGCCTGCCGGCCTTCCCTCCGCAGGTCTTTACGCTGCCGCAGTACGGTTACGCGACGCTGAACCGCGACAACACAGAAAATCCCACCGAGAGGAGCAGCTTCTTCTGCCTAGAGTACTTTCCCAGCAAGATGCTGAGAACGGGCAACAACTTTGAGTTTACCTACAACTTTGAGGAGGTGCCCTTCCACTCCAGCTTCGCTCCCAGTCAGAACCTGTTCAAGCTGGCCAACCCGCTGGTGGACCAGTACTTGTACCGCTTCGTGAGCACAAATAACACTGGCGGAGTCCAGTTCAACAAGAACCTGGCCGGGAGATACGCCAACACCTACAAAAACTGGTTCCCGGGGCCCATGGGCCGAACCCAGGGCTGGAACCTGGGCTCCGGGGTCAACCGCGCCAGTGTCAGCGCCTTCGCCACGACCAATAGGATGGAGCTCGAGGGCGCGAGTTACCAGGTGCCCCCGCAGCCGAACGGCATGACCAACAACCTCCAGGGCAGCAACACCTATGCCCTGGAGAACACTATGATCTTCAACAGCCAGCCGGCGAACCCGGGCACCACCGCCACGTACCTCGAGGGCAACATGCTCATCACCAGCGAGAGCGAGACGCAGCCGGTGAACCGCGTGGCGTACAACGTCGGCGGGCAGATGGCCACCAACAACCAGAGCTCCACCACTGCCCCCGCGACCGGCACGTACAACCTCCAGGAAATCGTGCCCGGCAGCGTGTGGATGGAGAGGGACGTGTACCTCCAAGGACCCATCTGGGCCAAGATCCCAGAGACGGGGGCGCACTTTCACCCCTCTCCGGCCATGGGCGGATTCGGACTCAAACACCCACCGCCCATGATGCTCATCAAGAACACGCCTGTGCCCGGAAATATCACCAGCTTCTCGGACGTGCCCGTCAGCAGCTTCATCACCCAGTACAGCACCGGGCAGGTCACCGTGGAGATGGAGTGGGAGCTCAAGAAGGAAAACTCCAAGAGGTGGAACCCAGAGATCCAGTACACAAACAACTACAACGACCCCCAGTTTGTGGACTTTGCCCCGGACAGCACCGGGGAATACAGAACCACCAGACCTATCGGAACCCGATACCTTACCCGACCCCTTTAA

SEQ ID NO: 95 - DNA, 2208 bp, Adeno-associated virus 6
atggctgccgatggttatcttccagattggctcgaggacaacctctctgagggcattcgcgagtggtgggacttgaaacctggagccccgaaacccaaagccaaccagcaaaagcaggacgacggccggggtctggtgcttcctggctacaagtacctcggacccttcaacggactcgacaagggggagcccgtcaacgcggcggatgcagcggccctcgagcacgacaaggcctacgaccagcagctcaaagcgggtgacaatccgtacctgcggtataaccacgccgacgccgagtttcaggagcgtctgcaagaagatacgtcttttgggggcaacctcgggcgagcagtcttccaggccaagaagagggttctcgaaccttttggtctggttgaggaaggtgctaagacggctcctggaaagaaacgtccggtagagcagtcgccacaagagccagactcctcctcgggcattggcaagacaggccagcagcccgctaaaaagagactcaattttggtcagactggcgactcagagtcagtccccgacccacaacctctcggagaacctccagcaacccccgctgctgtgggacctactacaatggcttcaggcggtggcgcaccaatggcagacaataacgaaggcgccgacggagtgggtaatgcctcaggaaattggcattgcgattccacatggctgggcgacagagtcatcaccaccagcacccgaacatgggccttgcccacctataacaaccacctctacaagcaaatctccagtgcttcaacgggggccagcaacgacaaccactacttcggctacagcaccccctgggggtattttgatttcaacagattccactgccatttctcaccacgtgactggcagcgactcatcaacaacaattggggattccggcccaagagactcaacttcaagctcttcaacatccaagtcaaggaggtcacgacgaatgatggcgtcacgaccatcgctaataaccttaccagcacggttcaagtcttctcggactcggagtaccagttgccgtacgtcctcggctctgcgcaccagggctgcctccctccgttcccggcggacgtgttcatgattccgcagtacggctacctaacgctcaacaatggcagccaggcagtgggacggtcatccttttactgcctggaatatttcccatcgcagatgctgagaacgggcaataactttaccttcagctacaccttcgaggacgtgcctttccacagcagctacgcgcacagccagagcctggaccggctgatgaatcctctcatcgaccagtacctgtattacctgaacagaactcagaatcagtccggaagtgcccaaaacaaggacttgctgtttagccgggggtctccagctggcatgtctgttcagcccaaaaactggctacctggaccctgttaccggcagcagcgcgtttctaaaacaaaaacagacaacaacaacagcaactttacctggactggtgcttcaaaatataaccttaatgggcgtgaatctataatcaaccctggcactgctatggcctcacacaaagacgacaaagacaagttctttcccatgagcggtgtcatgatttttggaaaggagagcgccggagcttcaaacactgcattggacaatgtcatgatcacagacgaagaggaaatcaaagccactaaccccgtggccaccgaaagatttgggactgtggcagtcaatctccagagcagcagcacagaccctgcgaccggagatgtgcatgttatgggagccttacctggaatggtgtggcaagacagagacgtatacctgcagggtcctatttgggccaaaattcctcacacggatggacactttcacccgtctcctctcatgggcggctttggacttaagcacccgcctcctcagatcctcatcaaaaacacgcctgttcctgcgaatcctccggcagagttttcggctacaaagtttgcttcattcatcacccagtattccacaggacaagtgagcgtggagattgaatgggagctgcagaaagaaaacagcaaacgctggaatcccgaagtgcagtatacatctaactatgcaaaatctgccaacgttgatttcactgtggacaacaatggactttatactgagcctcgccccattggcacccgttacctcacccgtcccctg

SEQ ID NO: 96 - protein, 736 aa, Adeno-associated virus 6
MAADGYLPDWLEDNLSEGIREWWDLKPGAPKPKANQQKQDDGRGLVLPGYKYLGPFNGLDKGEPVNAADAAALEHDKAYDQQLKAGDNPYLRYNHADAEFQERLQEDTSFGGNLGRAVFQAKKRVLEPFGLVEEGAKTAPGKKRPVEQSPQEPDSSSGIGKTGQQPAKKRLNFGQTGDSESVPDPQPLGEPPATPAAVGPTTMASGGGAPMADNNEGADGVGNASGNWHCDSTWLGDRVITTSTRTWALPTYNNHLYKQISSASTGASNDNHYFGYSTPWGYFDFNRFHCHFSPRDWQRLINNNWGFRPKRLNFKLFNIQVKEVTTNDGVTTIANNLTSTVQVFSDSEYQLPYVLGSAHQGCLPPFPADVFMIPQYGYLTLNNGSQAVGRSSFYCLEYFPSQMLRTGNNFTFSYTFEDVPFHSSYAHSQSLDRLMNPLIDQYLYYLNRTQNQSGSAQNKDLLFSRGSPAGMSVQPKNWLPGPCYRQQRVSKTKTDNNNSNFTWTGASKYNLNGRESIINPGTAMASHKDDKDKFFPMSGVMIFGKESAGASNTALDNVMITDEEEIKATNPVATERFGTVAVNLQSSSTDPATGDVHVMGALPGMVWQDRDVYLQGPIWAKIPHTDGHFHPSPLMGGFGLKHPPPQILIKNTPVPANPPAEFSATKFASFITQYSTGQVSVEIEWELQKENSKRWNPEVQYTSNYAKSANVDFTVDNNGLYTEPRPIGTRYLTRPL

SEQ ID NO: 97 - protein, 623 aa, Adeno-associated virus 6
MPGFYEIVIKVPSDLDEHLPGISDSFVNWVAEKEWELPPDSDMDLNLIEQAPLTVAEKLQRDFLVQWRRVSKAPEALFFVQFEKGESYFHLHILVETTGVKSMVLGRFLSQIRDKLVQTIYRGIEPTLPNWFAVTKTRNGAGGGNKVVDECYIPNYLLPKTQPELQWAWTNMEEYISACLNLAERKRLVAHDLTHVSQTQEQNKENLNPNSDAPVIRSKTSARYMELVGWLVDRGITSEKQWIQEDQASYISFNAASNSRSQIKAALDNAGKIMALTKSAPDYLVGPAPPADIKTNRIYRILELNGYDPAYAGSVFLGWAQKRFGKRNTIWLFGPATTGKTNIAEAIAHAVPFYGCVNWTNENFPFNDCVDKMVIWWEEGKMTAKVVESAKAILGGSKVRVDQKCKSSAQIDPTPVIVTSNTNMCAVIDGNSTTFEHQQPLQDRMFKFELTRRLEHDFGKVTKQEVKEFFRWAQDHVTEVAHEFYVRKGGANKRPAPDDADKSEPKRACPSVADPSTSDAEGAPVDFADRYQNKCSRHAGMLQMLFPCKTCERMNQNFNICFTHGTRDCSECFPGVSESQPVVRKRTYRKLCAIHHLLGRAPEIACSACDLVNVDLDDCVSEQ

SEQ ID NO: 98 - DNA, 4683 bp, Adeno-associated virus 6
ttggccactccctctctgcgcgctcgctcgctcactgaggccgggcgaccaaaggtcgcccgacgcccgggctttgcccgggcggcctcagtgagcgagcgagcgcgcagagagggagtggccaactccatcactaggggttcctggaggggtggagtcgtgacgtgaattacgtcatagggttagggaggtcctgtattagaggtcacgtgagtgttttgcgacattttgcgacaccatgtggtcacgctgggtatttaagcccgagtgagcacgcagggtctccattttgaagcgggaggtttgaacgcgcagcgccatgccggggttttacgagattgtgattaaggtccccagcgaccttgacgagcatctgcccggcatttctgacagctttgtgaactgggtggccgagaaggaatgggagttgccgccagattctgacatggatctgaatctgattgagcaggcacccctgaccgtggccgagaagctgcagcgcgacttcctggtccagtggcgccgcgtgagtaaggccccggaggccctcttctttgttcagttcgagaagggcgagtcctacttccacctccatattctggtggagaccacgggggtcaaatccatggtgctgggccgcttcctgagtcagattagggacaagctggtgcagaccatctaccgcgggatcgagccgaccctgcccaactggttcgcggtgaccaagacgcgtaatggcgccggaggggggaacaaggtggtggacgagtgctacatccccaactacctcctgcccaagactcagcccgagctgcagtgggcgtggactaacatggaggagtatataagcgcgtgtttaaacctggccgagcgcaaacggctcgtggcgcacgacctgacccacgtcagccagacccaggagcagaacaaggagaatctgaaccccaattctgacgcgcctgtcatccggtcaaaaacctccgcacgctacatggagctggtcgggtggctggtggaccggggcatcacctccgagaagcagtggatccaggaggaccaggcctcgtacatctccttcaacgccgcctccaactcgcggtcccagatcaaggccgctctggacaatgccggcaagatcatggcgctgaccaaatccgcgcccgactacctggtaggccccgctccgcccgccgacattaaaaccaaccgcatttaccgcatcctggagctgaacggctacgaccctgcctacgccggctccgtctttctcggctgggcccagaaaaggttcggaaaacgcaacaccatctggctgtttgggccggccaccacgggcaagaccaacatcgcggaagccatcgcccacgccgtgcccttctacggctgcgtcaactggaccaatgagaactttcccttcaacgattgcgtcgacaagatggtgatctggtgggaggagggcaagatgacggccaaggtcgtggagtccgccaaggccattctcggcggcagcaaggtgcgcgtggaccaaaagtgcaagtcgtccgcccagatcgatcccacccccgtgatcgtcacctccaacaccaacatgtgcgccgtgattgacgggaacagcaccaccttcgagcaccagcagccgttgcaggaccggatgttcaaatttgaactcacccgccgtctggagcatgactttggcaaggtgacaaagcaggaagtcaaagagttcttccgctgggcgcaggatcacgtgaccgaggtggcgcatgagttctacgtcagaaagggtggagccaacaagagacccgcccccgatgacgcggataaaagcgagcccaagcgggcctgcccctcagtcgcggatccatcgacgtcagacgcggaaggagctccggtggactttgccgacaggtaccaaaacaaatgttctcgtcacgcgggcatgcttcagatgctgtttccctgcaaaacatgcgagagaatgaatcagaatttcaacatttgcttcacgcacgggaccagagactgttcagaatgtttccccggcgtgtcagaatctcaaccggtcgtcagaaagaggacgtatcggaaactctgtgccattcatcatctgctggggcgggctcccgagattgcttgctcggcctgcgatctggtcaacgtggatctggatgactgtgtttctgagcaataaatgacttaaaccaggtatggctgccgatggttatcttccagattggctcgaggacaacctctctgagggcattcgcgagtggtgggacttgaaacctggagccccgaaacccaaagccaaccagcaaaagcaggacgacggccggggtctggtgcttcctggctacaagtacctcggacccttcaacggactcgacaagggggagcccgtcaacgcggcggatgcagcggccctcgagcacgacaaggcctacgaccagcagctcaaagcgggtgacaatccgtacctgcggtataaccacgccgacgccgagtttcaggagcgtctgcaagaagatacgtcttttgggggcaacctcgggcgagcagtcttccaggccaagaagagggttctcgaaccttttggtctggttgaggaaggtgctaagacggctcctggaaagaaacgtccggtagagcagtcgccacaagagccagactcctcctcgggcattggcaagacaggccagcagcccgctaaaaagagactcaattttggtcagactggcgactcagagtcagtccccgacccacaacctctcggagaacctccagcaacccccgctgctgtgggacctactacaatggcttcaggcggtggcgcaccaatggcagacaataacgaaggcgccgacggagtgggtaatgcctcaggaaattggcattgcgattccacatggctgggcgacagagtcatcaccaccagcacccgaacatgggccttgcccacctataacaaccacctctacaagcaaatctccagtgcttcaacgggggccagcaacgacaaccactacttcggctacagcaccccctgggggtattttgatttcaacagattccactgccatttctcaccacgtgactggcagcgactcatcaacaacaattggggattccggcccaagagactcaacttcaagctcttcaacatccaagtcaaggaggtcacgacgaatgatggcgtcacgaccatcgctaataaccttaccagcacggttcaagtcttctcggactcggagtaccagttgccgtacgtcctcggctctgcgcaccagggctgcctccctccgttcccggcggacgtgttcatgattccgcagtacggctacctaacgctcaacaatggcagccaggcagtgggacggtcatccttttactgcctggaatatttcccatcgcagatgctgagaacgggcaataactttaccttcagctacaccttcgaggacgtgcctttccacagcagctacgcgcacagccagagcctggaccggctgatgaatcctctcatcgaccagtacctgtattacctgaacagaactcagaatcagtccggaagtgcccaaaacaaggacttgctgtttagccgggggtctccagctggcatgtctgttcagcccaaaaactggctacctggaccctgttaccggcagcagcgcgtttctaaaacaaaaacagacaacaacaacagcaactttacctggactggtgcttcaaaatataaccttaatgggcgtgaatctataatcaaccctggcactgctatggcctcacacaaagacgacaaagacaagttctttcccatgagcggtgtcatgatttttggaaaggagagcgccggagcttcaaacactgcattggacaatgtcatgatcacagacgaagaggaaatcaaagccactaaccccgtggccaccgaaagatttgggactgtggcagtcaatctccagagcagcagcacagaccctgcgaccggagatgtgcatgttatgggagccttacctggaatggtgtggcaagacagagacgtatacctgcagggtcctatttgggccaaaattcctcacacggatggacactttcacccgtctcctctcatgggcggctttggacttaagcacccgcctcctcagatcctcatcaaaaacacgcctgttcctgcgaatcctccggcagagttttcggctacaaagtttgcttcattcatcacccagtattccacaggacaagtgagcgtggagattgaatgggagctgcagaaagaaaacagcaaacgctggaatcccgaagtgcagtatacatctaactatgcaaaatctgccaacgttgatttcactgtggacaacaatggactttatactgagcctcgccccattggcacccgttacctcacccgtcccctgtaattgtgtgttaatcaataaaccggttaattcgtgtcagttgaactttggtctcatgtcgttattatcttatctggtcaccatagcaaccggttacacattaactgcttagttgcgcttcgcgaatacccctagtgatggagttgcccactccctctatgcgcgctcgctcgctcggtggggccggcagagcagagctctgccgtctgcggacctttggtccgcaggccccaccgagcgagcgagcgcgcatagagggagtgggcaa

SEQ ID NO: 99 - DNA, 2211 bp, Adeno-associated virus 6
atggctgccgatggttatcttccagattggctcgaggacaacctctctgagggcattcgcgagtggtgggacttgaaacctggagccccgaaacccaaagccaaccagcaaaagcaggacgacggccggggtctggtgcttcctggctacaagtacctcggacccttcaacggactcgacaagggggagcccgtcaacgcggcggatgcagcggccctcgagcacgacaaggcctacgaccagcagctcaaagcgggtgacaatccgtacctgcggtataaccacgccgacgccgagtttcaggagcgtctgcaagaagatacgtcttttgggggcaacctcgggcgagcagtcttccaggccaagaagagggttctcgaaccttttggtctggttgaggaaggtgctaagacggctcctggaaagaaacgtccggtagagcagtcgccacaagagccagactcctcctcgggcattggcaagacaggccagcagcccgctaaaaagagactcaattttggtcagactggcgactcagagtcagtccccgacccacaacctctcggagaacctccagcaacccccgctgctgtgggacctactacaatggcttcaggcggtggcgcaccaatggcagacaataacgaaggcgccgacggagtgggtaatgcctcaggaaattggcattgcgattccacatggctgggcgacagagtcatcaccaccagcacccgaacatgggccttgcccacctataacaaccacctctacaagcaaatctccagtgcttcaacgggggccagcaacgacaaccactacttcggctacagcaccccctgggggtattttgatttcaacagattccactgccatttctcaccacgtgactggcagcgactcatcaacaacaattggggattccggcccaagagactcaacttcaagctcttcaacatccaagtcaaggaggtcacgacgaatgatggcgtcacgaccatcgctaataaccttaccagcacggttcaagtcttctcggactcggagtaccagttgccgtacgtcctcggctctgcgcaccagggctgcctccctccgttcccggcggacgtgttcatgattccgcagtacggctacctaacgctcaacaatggcagccaggcagtgggacggtcatccttttactgcctggaatatttcccatcgcagatgctgagaacgggcaataactttaccttcagctacaccttcgaggacgtgcctttccacagcagctacgcgcacagccagagcctggaccggctgatgaatcctctcatcgaccagtacctgtattacctgaacagaactcagaatcagtccggaagtgcccaaaacaaggacttgctgtttagccgggggtctccagctggcatgtctgttcagcccaaaaactggctacctggaccctgttaccggcagcagcgcgtttctaaaacaaaaacagacaacaacaacagcaactttacctggactggtgcttcaaaatataaccttaatgggcgtgaatctataatcaaccctggcactgctatggcctcacacaaagacgacaaagacaagttctttcccatgagcggtgtcatgatttttggaaaggagagcgccggagcttcaaacactgcattggacaatgtcatgatcacagacgaagaggaaatcaaagccactaaccccgtggccaccgaaagatttgggactgtggcagtcaatctccagagcagcagcacagaccctgcgaccggagatgtgcatgttatgggagccttacctggaatggtgtggcaagacagagacgtatacctgcagggtcctatttgggccaaaattcctcacacggatggacactttcacccgtctcctctcatgggcggctttggacttaagcacccgcctcctcagatcctcatcaaaaacacgcctgttcctgcgaatcctccggcagagttttcggctacaaagtttgcttcattcatcacccagtattccacaggacaagtgagcgtggagattgaatgggagctgcagaaagaaaacagcaaacgctggaatcccgaagtgcagtatacatctaactatgcaaaatctgccaacgttgatttcactgtggacaacaatggactttatactgagcctcgccccattggcacccgttacctcacccgtcccctgtaa

SEQ ID NO: 100 - protein, 736 aa, Adeno-associated virus; identical to SEQ ID NO: 96

SEQ ID NO: 101 - protein, 736 aa, Adeno-associated virus
MAADGYLPDWLEDNLSEGIREWWDLKPGAPKPKANQQKQDDGRGLVLPGYKYLGPFNGLDKGEPVNAADAAALEHDKAYDQQLKAGDNPYLRYNHADAEFQERLQEDTSFGGNLGRAVFQAKKRVLEPFGLVEEGAKTAPGKKRPVEQSPQEPDSSSGIGKTGQQPAKKRLNFGQTGDSESVPDPQPLGEPPATPAAVGPTTMASGGGAPMADNNEGADGVGNASGNWHCDSTWLGDRVITTSTRTWALPTYNNHLYKQISSASTGASNDNHYFGYSTPWGYFDFNRFHCHFSPRDWQRLINNNWGFRPKRLNFKLFNIQVKEVTTNDGVTTIANNLTSTVQVFSDSEYQLPYVLGSAHQGCLPPFPADVFMIPQYGYLTLNNGSQAVGRSSFYCLEYFPSQMLRTGNNFTFSYTFEDVPFHSSYAHSQSLDRLMNPLIDQYLYYLNRTQNQSGSAQNKDLLFSRGSPAGMSVQPKNWLPGPCYRQQRVSKTKTDNNNSNFTWTGASKYNLNGRESIINPGTAMASHKDDEDKFFPMSGVMIFGKESAGASNTALDNVMITDEEEIKATNPVATERFGTVAVNLQSSSTDPATGDVHVMGALPGMVWQDRDVYLQGPIWAKIPHTDGHFHPSPLMGGFGLKHPPPQILIKNTPVPANPPAEFSATKFASFITQYSTGQVSVEIEWELQKENSKRWNPEVQYTSNYAKSANVDFTVDNNGLYTEPRPIGTRYLTRPL

SEQ ID NO: 102 - protein, 736 aa, Adeno-associated virus
MAADGYLPDWLEDNLSEGIREWWDLKPGAPKPKANQQKQDDGRGLVLPGYKYLGPFNGLDKGEPVNAADAAALEHDKAYDQQLKAGDNPYLRYNHADAEFQERLQEDTSFGGNLGRAVFQAKKRVLEPLGLVEEGAKTAPGKKRPVEQSPQEPDSSSGIGKTGQQPAKKRLNFGQTGDSESVPDPQPLGEPPATPAAVGPTTMASGGGAPMADNNEGADGVGNASGNWHCDSTWLGDRVITTSTRTWALPTYNNHLYKQISSASTGASNDNHYFGYSTPWGYFDFNRFHCHFSPRDWQRLINNNWGFRPKRLNFKLFNIQVKEVTTNDGVTTIANNLTSTVQVFSDSEYQLPYVLGSAHQGCLPPFPADVFMIPQYGYLTLNNGSQAVGRSSFYCLEYFPSQMLRTGNNFTFSYTFEDVPFHSSYAHSQSLDRLMNPLIDQYLYYLNRTQNQSGSAQNKDLLFSRGSPAGMSVQPKNWLPGPCYRQQRVSKTKTDNNNSNFTWTGASKYNLNGRESIINPGTAMASHKDDEDKFFPMSGVMIFGKESAGASNTALDNVMITDEEEIKATNPVATERFGTVAVNLQSSSTDPATGDVHVMGALPGMVWQDRDVYLQGPIWAKIPHTDGHFHPSPLMGGFGLKHPPPQILIKNTPVPANPPAEFSATKFASFITQYSTGQVSVEIEWELQKENSKRWNPEVQYTSNYAKSANVDFTVDNNGLYTEPRPIGTRYLTRPL

SEQ ID NO: 103 - protein, 736 aa, Adeno-associated virus
MAADGYLPDWLEDNLSEGIREWWDLKPGAPKPKANQQKQDDGRGLVLPGYKYLGPFNGLDKGEPVNAADAAALEHDKAYDQQLKAGDNPYLRYNHADAEFQERLQEDTSFGGNLGRAVFQAKKRVLEPLGLVEEGAKTAPGKKRPVEQSPQEPDSSSGIGKTGQQPAKKRLNFGQTGDSESVPDPQPLGEPPATPAAVGPTTMASGGGAPMADNNEGADGVGNASGNWHCDSTWLGDRVITTSTRTWALPTYNNHLYKQISSASTGASNDNHYFGYSTPWGYFDFNRFHCHFSPRDWQRLINNNWGFRPKRLNFKLFNIQVKEVTTNDGVTTIANNLTSTVQVFSDSEYQLPYVLGSAHQGCLPPFPADVFMIPQYGYLTLNNGSQAVGRSSFYCLEYFPSQMLRTGNNFTFSYTFEDVPFHSSYAHSQSLDRLMNPLIDQYLYYLNRTQNQSGSAQNKDLLFSRGSPAGMSVQPKNWLPGPCYRQQRVSKTKTDNNNSNFTWTGASKYNLNGRESIINPGTAMASHKDDKDKFFPMSGVMIFGKESAGASNTALDNVMITDEEEIKATNPVATERFGTVAVNLQSSSTDPATGDVHVMGALPGMVWQDRDVYLQGPIWAKIPHTDGHFHPSPLMGGFGLKHPPPQILIKNTPVPANPPAEFSATKFASFITQYSTGQVSVEIEWELQKENSKRWNPEVQYTSNYAKSANVDFTVDNNGLYTEPRPIGTRYLTRPL

SEQ ID NO: 104 - DNA, 2214 bp, Adeno-associated virus 7
atggctgccgatggttatcttccagattggctcgaggacaacctctctgagggcattcgcgagtggtgggacctgaaacctggagccccgaaacccaaagccaaccagcaaaagcaggacaacggccggggtctggtgcttcctggctacaagtacctcggacccttcaacggactcgacaagggggagcccgtcaacgcggcggacgcagcggccctcgagcacgacaaggcctacgaccagcagctcaaagcgggtgacaatccgtacctgcggtataaccacgccgacgccgagtttcaggagcgtctgcaagaagatacgtcatttgggggcaacctcgggcgagcagtcttccaggccaagaagcgggttctcgaacctctcggtctggttgaggaaggcgctaagacggctcctgcaaagaagagaccggtagagccgtcacctcagcgttcccccgactcctccacgggcatcggcaagaaaggccagcagcccgccagaaagagactcaatttcggtcagactggcgactcagagtcagtccccgaccctcaacctctcggagaacctccagcagcgccctctagtgtgggatctggtacagtggctgcaggcggtggcgcaccaatggcagacaataacgaaggtgccgacggagtgggtaatgcctcaggaaattggcattgcgattccacatggctgggcgacagagtcattaccaccagcacccgaacctgggccctgcccacctacaacaaccacctctacaagcaaatctccagtgaaactgcaggtagtaccaacgacaacacctacttcggctacagcaccccctgggggtattttgactttaacagattccactgccacttctcaccacgtgactggcagcgactcatcaacaacaactggggattccggcccaagaagctgcggttcaagctcttcaacatccaggtcaaggaggtcacgacgaatgacggcgttacgaccatcgctaataaccttaccagcacgattcaggtattctcggactcggaataccagctgccgtacgtcctcggctctgcgcaccagggctgcctgcctccgttcccggcggacgtcttcatgattcctcagtacggctacctgactctcaacaatggcagtcagtctgtgggacgttcctccttctactgcctggagtacttcccctctcagatgctgagaacgggcaacaactttgagttcagctacagcttcgaggacgtgcctttccacagcagctacgcacacagccagagcctggaccggctgatgaatcccctcatcgaccagtacttgtactacctggccagaacacagagtaacccaggaggcacagctggcaatcgggaactgcagttttaccagggcgggccttcaactatggccgaacaagccaagaattggttacctggaccttgcttccggcaacaaagagtctccaaaacgctggatcaaaacaacaacagcaactttgcttggactggtgccaccaaatatcacctgaacggcagaaactcgttggttaatcccggcgtcgccatggcaactcacaaggacgacgaggaccgctttttcccatccagcggagtcctgatttttggaaaaactggagcaactaacaaaactacattggaaaatgtgttaatgacaaatgaagaagaaattcgtcctactaatcctgtagccacggaagaatacgggatagtcagcagcaacttacaagcggctaatactgcagcccagacacaagttgtcaacaaccagggagccttacctggcatggtctggcagaaccgggacgtgtacctgcagggtcccatctgggccaagattcctcacacggatggcaactttcacccgtctcctttgatgggcggctttggacttaaacatccgcctcctcagatcctgatcaagaacactcccgttcccgctaatcctccggaggtgtttactcctgccaagtttgcttcgttcatcacacagtacagcaccggacaagtcagcgtggaaatcgagtgggagctgcagaaggaaaacagcaagcgctggaacccggagattcagtacacctccaactttgaaaagcagactggtgtggactttgccgttgacagccagggtgtttactctgagcctcgccctattggcactcgttacctcacccgtaatctgtaa

SEQ ID NO: 105 - protein, 738 aa, Adeno-associated virus 7
MAADGYLPDWLEDNLSEGIREWWALKPGAPKPKANQQKQDDGRGLVLPGYKYLGPFNGLDKGEPVNAADAAALEHDKAYDQQLQAGDNPYLRYNHADAEFQERLQEDTSFGGNLGRAVFQAKKRVLEPLGLVEEGAKTAPGKKRPVEPSPQRSPDSSTGIGKKGQQPARKRLNFGQTGDSESVPDPQPLGEPPAAPSGVGPNTMAAGGGAPMADNNEGADGVGSSSGNWHCDSTWLGDRVITTSTRTWALPTYNNHLYKQISNGTSGGATNDNTYFGYSTPWGYFDFNRFHCHFSPRDWQRLINNNWGFRPKRLSFKLFNIQVKEVTQNEGTKTIANNLTSTIQVFTDSEYQLPYVLGSAHQGCLPPFPADVFMIPQYGYLTLNNGSQAVGRSSFYCLEYFPSQMLRTGNNFQFTYTFEDVPFHSSYAHSQSLDRLMNPLIDQYLYYLSRTQTTGGTANTQTLGFSQGGPNTMANQAKNWLPGPCYRQQRVSTTTGQNNNSNFAWTAGTKYHLNGRNSLANPGIAMATHKDDEERFFPSNGILIFGKQNAARDNADYSDVMLTSEEEIKTTNPVATEEYGIVADNLQQQNTAPQIGTVNSQGALPGMVWQNRDVYLQGPIWAKIPHTDGNFHPSPLMGGFGLKHPPPQILIKNTPVPADPPTTFNQSKLNSFITQYSTGQVSVEIEWELQKENSKRWNPEIQYTSNYYKSTSVDFAVNTEGVYSEPRPIGTRYLTRNL

SEQ ID NO: 106 - protein, 737 aa, Adeno-associated virus 7
MAADGYLPDWLEDNLSEGIREWWDLKPGAPKPKANQQKQDNGRGLVLPGYKYLGPFNGLDKGEPVNAADAAALEHDKAYDQQLKAGDNPYLRYNHADAEFQERLQEDTSFGGNLGRAVFQAKKRVLEPLGLVEEGAKTAPAKKRPVEPSPQRSPDSSTGIGKKGQQPARKRLNFGQTGDSESVPDPQPLGEPPAAPSSVGSGTVAAGGGAPMADNNEGADGVGNASGNWHCDSTWLGDRVITTSTRTWALPTYNNHLYKQISSETAGSTNDNTYFGYSTPWGYFDFNRFHCHFSPRDWQRLINNNWGFRPKKLRFKLFNIQVKEVTTNDGVTTIANNLTSTIQVFSDSEYQLPYVLGSAHQGCLPPFPADVFMIPQYGYLTLNNGSQSVGRSSFYCLEYFPSQMLRTGNNFEFSYSFEDVPFHSSYAHSQSLDRLMNPLIDQYLYYLARTQSNPGGTAGNRELQFYQGGPSTMAEQAKNWLPGPCFRQQRVSKTLDQNNNSNFAWTGATKYHLNGRNSLVNPGVAMATHKDDEDRFFPSSGVLIFGKTGATNKTTLENVLMTNEEEIRPTNPVATEEYGIVSSNLQAANTAAQTQVVNNQGALPGMVWQNRDVYLQGPIWAKIPHTDGNFHPSPLMGGFGLKHPPPQILIKNTPVPANPPEVFTPAKFASFITQYSTGQVSVEIEWELQKENSKRWNPEIQYTSNFEKQTGVDFAVDSQGVYSEPRPIGTRYLTRNL

SEQ ID NO: 107 - protein, 623 aa, Adeno-associated virus 7
MPGFYEIVIKVPSDLDEHLPGISDSFVNWVAEKEWELPPDSDMDLNLIEQAPLTVAEKLQRDFLVQWRRVSKAPEALFFVQFEKGESYFHLHVLVETTGVKSMVLGRFLSQIREKLVQTIYRGVEPTLPNWFAVTKTRNGAGGGNKVVDECYIPNYLLPKTQPELQWAWTNMEEYISACLNLAERKRLVAQHLTHVSQTQEQNKENLNPNSDAPVIRSKTSARYMELVGWLVDRGITSEKQWIQEDQASYISFNAASNSRSQIKAALDNAGKIMALTKSAPDYLVGPSLPADIKTNRIYRILELNGYDPAYAGSVFLGWAQKKFGKRNTIWLFGPATTGKTNIAEAIAHAVPFYGCVNWTNENFPFNDCVDKMVIWWEEGKMTAKVVESAKAILGGSKVRVDQKCKSSAQIDPTPVIVTSNTNMCAVIDGNSTTFEHQQPLQDRMFKFELTRRLEHDFGKVTKQEVKEFFRWASDHVTEVAHEFYVRKGGASKRPAPDDADISEPKRACPSVADPSTSDAEGAPVDFADRYQNKCSRHAGMIQMLFPCKTCERMNQNFNICFTHGVRDCLECFPGVSESQPVVRKKTYRKLCAIHHLLGRAPEIACSACDLVNVDLDDCVSEQ

SEQ ID NO: 108 - DNA, 4721 bp, Adeno-associated virus 7
ttggccactccctctatgcgcgctcgctcgctcggtggggcctgcggaccaaaggtccgcagacggcagagctctgctctgccggccccaccgagcgagcgagcgcgcatagagggagtggccaactccatcactaggggtaccgcgaagcgcctcccacgctgccgcgtcagcgctgacgtaaatcacgtcataggggagtggtcctgtattagctgtcacgtgagtgcttttgcgacattttgcgacaccacgtggccatttgaggtatatatggccgagtgagcgagcaggatctccattttgaccgcgaaatttgaacgagcagcagccatgccgggtttctacgagatcgtgatcaaggtgccgagcgacctggacgagcacctgccgggcatttctgactcgtttgtgaactgggtggccgagaaggaatgggagctgcccccggattctgacatggatctgaatctgatcgagcaggcacccctgaccgtggccgagaagctgcagcgcgacttcctggtccaatggcgccgcgtgagtaaggccccggaggccctgttctttgttcagttcgagaagggcgagagctacttccaccttcacgttctggtggagaccacgggggtcaagtccatggtgctaggccgcttcctgagtcagattcgggagaagctggtccagaccatctaccgcggggtcgagcccacgctgcccaactggttcgcggtgaccaagacgcgtaatggcgccggcggggggaacaaggtggtggacgagtgctacatccccaactacctcctgcccaagacccagcccgagctgcagtgggcgtggactaacatggaggagtatataagcgcgtgtttgaacctggccgaacgcaaacggctcgtggcgcagcacctgacccacgtcagccagacgcaggagcagaacaaggagaatctgaaccccaattctgacgcgcccgtgatcaggtcaaaaacctccgcgcgctacatggagctggtcgggtggctggtggaccggggcatcacctccgagaagcagtggatccaggaggaccaggcctcgtacatctccttcaacgccgcctccaactcgcggtcccagatcaaggccgcgctggacaatgccggcaagatcatggcgctgaccaaatccgcgcccgactacctggtggggccctcgctgcccgcggacattaaaaccaaccgcatctaccgcatcctggagctgaacgggtacgatcctgcctacgccggctccgtctttctcggctgggcccagaaaaagttcgggaagcgcaacaccatctggctgtttgggcccgccaccaccggcaagaccaacattgcggaagccatcgcccacgccgtgcccttctacggctgcgtcaactggaccaatgagaactttcccttcaacgattgcgtcgacaagatggtgatctggtgggaggagggcaagatgacggccaaggtcgtggagtccgccaaggccattctcggcggcagcaaggtgcgcgtggaccaaaagtgcaagtcgtccgcccagatcgaccccacccccgtgatcgtcacctccaacaccaacatgtgcgccgtgattgacgggaacagcaccaccttcgagcaccagcagccgttgcaggaccggatgttcaaatttgaactcacccgccgtctggagcacgactttggcaaggtgacgaagcaggaagtcaaagagttcttccgctgggccagtgatcacgtgaccgaggtggcgcatgagttctacgtcagaaagggcggagccagcaaaagacccgcccccgatgacgcggatataagcgagcccaagcgggcctgcccctcagtcgcggatccatcgacgtcagacgcggaaggagctccggtggactttgccgacaggtaccaaaacaaatgttctcgtcacgcgggcatgattcagatgctgtttccctgcaaaacgtgcgagagaatgaatcagaatttcaacatttgcttcacacacggggtcagagactgtttagagtgtttccccggcgtgtcagaatctcaaccggtcgtcagaaaaaagacgtatcggaaactctgcgcgattcatcatctgctggggcgggcgcccgagattgcttgctcggcctgcgacctggtcaacgtggacctggacgactgcgtttctgagcaataaatgacttaaaccaggtatggctgccgatggttatcttccagattggctcgaggacaacctctctgagggcattcgcgagtggtgggacctgaaacctggagccccgaaacccaaagccaaccagcaaaagcaggacaacggccggggtctggtgcttcctggctacaagtacctcggacccttcaacggactcgacaagggggagcccgtcaacgcggcggacgcagcggccctcgagcacgacaaggcctacgaccagcagctcaaagcgggtgacaatccgtacctgcggtataaccacgccgacgccgagtttcaggagcgtctgcaagaagatacgtcatttgggggcaacctcgggcgagcagtcttccaggccaagaagcgggttctcgaacctctcggtctggttgaggaaggcgctaagacggctcctgcaaagaagagaccggtagagccgtcacctcagcgttcccccgactcctccacgggcatcggcaagaaaggccagcagcccgccagaaagagactcaatttcggtcagactggcgactcagagtcagtccccgaccctcaacctctcggagaacctccagcagcgccctctagtgtgggatctggtacagtggctgcaggcggtggcgcaccaatggcagacaataacgaaggtgccgacggagtgggtaatgcctcaggaaattggcattgcgattccacatggctgggcgacagagtcattaccaccagcacccgaacctgggccctgcccacctacaacaaccacctctacaagcaaatctccagtgaaactgcaggtagtaccaacgacaacacctacttcggctacagcaccccctgggggtattttgactttaacagattccactgccacttctcaccacgtgactggcagcgactcatcaacaacaactggggattccggcccaagaagctgcggttcaagctcttcaacatccaggtcaaggaggtcacgacgaatgacggcgttacgaccatcgctaataaccttaccagcacgattcaggtattctcggactcggaataccagctgccgtacgtcctcggctctgcgcaccagggctgcctgcctccgttcccggcggacgtcttcatgattcctcagtacggctacctgactctcaacaatggcagtcagtctgtgggacgttcctccttctactgcctggagtacttcccctctcagatgctgagaacgggcaacaactttgagttcagctacagcttcgaggacgtgcctttccacagcagctacgcacacagccagagcctggaccggctgatgaatcccctcatcgaccagtacttgtactacctggccagaacacagagtaacccaggaggcacagctggcaatcgggaactgcagttttaccagggcgggccttcaactatggccgaacaagccaagaattggttacctggaccttgcttccggcaacaaagagtctccaaaacgctggatcaaaacaacaacagcaactttgcttggactggtgccaccaaatatcacctgaacggcagaaactcgttggttaatcccggcgtcgccatggcaactcacaaggacgacgaggaccgctttttcccatccagcggagtcctgatttttggaaaaactggagcaactaacaaaactacattggaaaatgtgttaatgacaaatgaagaagaaattcgtcctactaatcctgtagccacggaagaatacgggatagtcagcagcaacttacaagcggctaatactgcagcccagacacaagttgtcaacaaccagggagccttacctggcatggtctggcagaaccgggacgtgtacctgcagggtcccatctgggccaagattcctcacacggatggcaactttcacccgtctcctttgatgggcggctttggacttaaacatccgcctcctcagatcctgatcaagaacactcccgttcccgctaatcctccggaggtgtttactcctgccaagtttgcttcgttcatcacacagtacagcaccggacaagtcagcgtggaaatcgagtgggagctgcagaaggaaaacagcaagcgctggaacccggagattcagtacacctccaactttgaaaagcagactggtgtggactttgccgttgacagccagggtgtttactctgagcctcgccctattggcactcgttacctcacccgtaatctgtaattgcatgttaatcaataaaccggttgattcgtttcagttgaactttggtctcctgtgcttcttatcttatcggtttccatagcaactggttacacattaactgcttgggtgcgcttcacgataagaacactgacgtcaccgcggtacccctagtgatggagttggccactccctctatgcgcgctcgctcgctcggtggggcctgcggaccaaaggtccgcagacggcagagctctgctctgccggccccaccgagcgagcgagcgcgcatagagggagtggccaa

SEQ ID NO: 109 - DNA, 2214 bp, Adeno-associated virus 7; identical to SEQ ID NO: 104

SEQ ID NO: 110 - protein, 737 aa, Adeno-associated virus 7; identical to SEQ ID NO: 106

SEQ ID NO: 111 - DNA, 2217 bp, Adeno-associated virus 8
atggctgccgatggttatcttccagattggctcgaggacaacctctctgagggcattcgcgagtggtgggcgctgaaacctggagccccgaagcccaaagccaaccagcaaaagcaggacgacggccggggtctggtgcttcctggctacaagtacctcggacccttcaacggactcgacaagggggagcccgtcaacgcggcggacgcagcggccctcgagcacgacaaggcctacgaccagcagctgcaggcgggtgacaatccgtacctgcggtataaccacgccgacgccgagtttcaggagcgtctgcaagaagatacgtcttttgggggcaacctcgggcgagcagtcttccaggccaagaagcgggttctcgaacctctcggtctggttgaggaaggcgctaagacggctcctggaaagaagagaccggtagagccatcaccccagcgttctccagactcctctacgggcatcggcaagaaaggccaacagcccgccagaaaaagactcaattttggtcagactggcgactcagagtcagttccagaccctcaacctctcggagaacctccagcagcgccctctggtgtgggacctaatacaatggctgcaggcggtggcgcaccaatggcagacaataacgaaggcgccgacggagtgggtagttcctcgggaaattggcattgcgattccacatggctgggcgacagagtcatcaccaccagcacccgaacctgggccctgcccacctacaacaaccacctctacaagcaaatctccaacgggacatcgggaggagccaccaacgacaacacctacttcggctacagcaccccctgggggtattttgactttaacagattccactgccacttttcaccacgtgactggcagcgactcatcaacaacaactggggattccggcccaagagactcagcttcaagctcttcaacatccaggtcaaggaggtcacgcagaatgaaggcaccaagaccatcgccaataacctcaccagcaccatccaggtgtttacggactcggagtaccagctgccgtacgttctcggctctgcccaccagggctgcctgcctccgttcccggcggacgtgttcatgattccccagtacggctacctaacactcaacaacggtagtcaggccgtgggacgctcctccttctactgcctggaatactttccttcgcagatgctgagaaccggcaacaacttccagtttacttacaccttcgaggacgtgcctttccacagcagctacgcccacagccagagcttggaccggctgatgaatcctctgattgaccagtacctgtactacttgtctcggactcaaacaacaggaggcacggcaaatacgcagactctgggcttcagccaaggtgggcctaatacaatggccaatcaggcaaagaactggctgccaggaccctgttaccgccaacaacgcgtctcaacgacaaccgggcaaaacaacaatagcaactttgcctggactgctgggaccaaataccatctgaatggaagaaattcattggctaatcctggcatcgctatggcaacacacaaagacgacgaggagcgtttttttcccagtaacgggatcctgatttttggcaaacaaaatgctgccagagacaatgcggattacagcgatgtcatgctcaccagcgaggaagaaatcaaaaccactaaccctgtggctacagaggaatacggtatcgtggcagataacttgcagcagcaaaacacggctcctcaaattggaactgtcaacagccagggggccttacccggtatggtctggcagaaccgggacgtgtacctgcagggtcccatctgggccaagattcctcacacggacggcaacttccacccgtctccgctgatgggcggctttggcctgaaacatcctccgcctcagatcctgatcaagaacacgcctgtacctgcggatcctccgaccaccttcaaccagtcaaagctgaactctttcatcacgcaatacagcaccggacaggtcagcgtggaaattgaatgggagctgcagaaggaaaacagcaagcgctggaaccccgagatccagtacacctccaactactacaaatctacaagtgtggactttgctgttaatacagaaggcgtgtactctgaaccccgccccattggcacccgttacctcacccgtaatctgtaa

SEQ ID NO: 112 - DNA, 2213 bp, Adeno-associated virus 8
atggctgccgatggttatcttccagattggctcgaggacaacctctctgagggcattcgcgagtggtgggcgctgaaacctggagccccgaagcccaaagccaaccagcaaaagcaggacgacggccggggtctggtgcttcctggctacaagtacctcggacccttcaacggactcgacaagggggagcccgtcaacgcggcggacgcagcggccctcgagcacgacaaggcctacgaccagcagctgcaggcgggtgacaatccgtacctgcggtataaccacgccgacgccgagtttcaggagcgtctgcaagaagatacgtcttttgggggcaacctcgggcgagcagtcttccaggccaagaagcgggttctcgaacctctcggtctggttgaggaaggcgctaagacggctcctggaaagaagagaccggtagagccatcaccccagcgttctccagactcctctacgggcatcggcaagaaaggccaacagcccgccagaaaaagactcaattttggtcagactggcgactcagagtcagttccagaccctcaacctctcggagaacctccagcagcgccctctggtgtgggacctaatacaatggctgcaggcggtggcgcaccaatggcagacaataacgaaggcgccgacggagtgggtagttcctcgggaaattggcattgcgattccacatggctgggcgacagagtcatcaccaccagcacccgaacctgggccctgcccacctacaacaaccacctctacaagcaaatctccaacgggacatcgggaggagccaccaacgacaacacctacttcggctacagcaccccctgggggtattttgactttaacagattccactgccacttttcaccacgtgactggcagcgactcatcaacaacaactggggattccggcccaagagactcagcttcaagctcttcaacatccaggtcaaggaggtcacgcagaatgaaggcaccaagaccatcgccaataacctcaccagcaccatccaggtgtttacggactcggagtaccagctgccgtacgttctcggctctgcccaccagggctgcctgcctccgttcccggcggacgtgttcatgattccccagtacggctacctaacactcaacaacggtagtcaggccgtgggacgctcctccttctactgcctggaatactttccttcgcagatgctgagaaccggcaacaacttccagtttacttacaccttcgaggacgtgcctttccacagcagctacgcccacagccagagcttggaccggctgatgaatcctctgattgaccagtacctgtactacttgtctcggactcaaacaacaggaggcacggcaaatacgcagactctgggcttcagccaaggtgggcctaatacaatggccaatcaggcaaagaactggctgccaggaccctgttaccgccaacaacgcgtctcaacgacaaccgggcaaaacaacaatagcaactttgcctggactgctgggaccaaataccatctgaatggaagaaattcattggctaatcctggcatcgctatggcaacacacaaagacgacgaggagcgtttttttcccagtaacgggatcctgatttttggcaaacaaaatgctgccagagacaatgcggattacagcgatgtcatgctcaccagcgaggaagaaatcaaaaccactaaccctgtggctacagaggaatacggtatcgtggcagataacttgcagcagcaaaacacggctcctcaaattggaactgtcaacagccagggggccttacccggtatggtctggcagaaccgggacgtgtacctgcagggtcccatctgggccaagattcctcacacggacggcaacttccacccgtctccgctgatgggcggctttggcctgaaacatcctccgcctcagatcctgatcaagaacacgcctgtacctgcggatcctccgaccaccttcaaccagtcaaagctgaactctttcatcacgcaatacagcaccggacaggtcagcgtggaaattgaatgggagctgcagaaggaaaacagcaagcgctggaaccccgagatccagtacacctccaactactacaaatctacaagtgtggactttgctgtaatacagaaggcgtgtactctgaaccccgccccattggcacccgttacctcacccgtaatctg

SEQ ID NO: 113 - DNA, 4393 bp, Adeno-associated virus 8
cagagagggagtggccaactccatcactaggggtagcgcgaagcgcctcccacgctgccgcgtcagcgctgacgtaaattacgtcataggggagtggtcctgtattagctgtcacgtgagtgcttttgcggcattttgcgacaccacgtggccatttgaggtatatatggccgagtgagcgagcaggatctccattttgaccgcgaaatttgaacgagcagcagccatgccgggcttctacgagatcgtgatcaaggtgccgagcgacctggacgagcacctgccgggcatttctgactcgtttgtgaactgggtggccgagaaggaatgggagctgcccccggattctgacatggatcggaatctgatcgagcaggcacccctgaccgtggccgagaagctgcagcgcgacttcctggtccaatggcgccgcgtgagtaaggccccggaggccctcttctttgttcagttcgagaagggcgagagctactttcacctgcacgttctggtcgagaccacgggggtcaagtccatggtgctaggccgcttcctgagtcagattcgggaaaagcttggtccagaccatctacccgcggggtcgagccccaccttgcccaactggttcgcggtgaccaaagacgcggtaatggcgccggcgggggggaacaaggtggtggacgagtgctacatccccaactacctcctgcccaagactcagcccgagctgcagtgggcgtggactaacatggaggagtatataagcgcgtgcttgaacctggccgagcgcaaacggctcgtggcgcagcacctgacccacgtcagccagacgcaggagcagaacaaggagaatctgaaccccaattctgacgcgcccgtgatcaggtcaaaaacctccgcgcgctatatggagctggtcgggtggctggtggaccggggcatcacctccgagaagcagtggatccaggaggaccaggcctcgtacatctccttcaacgccgcctccaactcgcggtcccagatcaaggccgcgctggacaatgccggcaagatcatggcgctgaccaaatccgcgcccgactacctggtggggccctcgctgcccgcggacattacccagaaccgcatctaccgcatcctcgctctcaacggctacgaccctgcctacgccggctccgtctttctcggctgggctcagaaaaagttcgggaaacgcaacaccatctggctgtttggacccgccaccaccggcaagaccaacattgcggaagccatcgcccacgccgtgcccttctacggctgcgtcaactggaccaatgagaactttcccttcaatgattgcgtcgacaagatggtgatctggtgggaggagggcaagatgacggccaaggtcgtggagtccgccaaggccattctcggcggcagcaaggtgcgcgtggaccaaaagtgcaagtcgtccgcccagatcgaccccacccccgtgatcgtcacctccaacaccaacatgtgcgccgtgattgacgggaacagcaccaccttcgagcaccagcagcctctccaggaccggatgtttaagttcgaactcacccgccgtctggagcacgactttggcaaggtgacaaagcaggaagtcaaagagttcttccgctgggccagtgatcacgtgaccgaggtggcgcatgagttttacgtcagaaagggcggagccagcaaaagacccgcccccgatgacgcggataaaagcgagcccaagcgggcctgcccctcagtcgcggatccatcgacgtcagacgcggaaggagctccggtggactttgccgacaggtaccaaaacaaatgttctcgtcacgcgggcatgcttcagatgctgtttccctgcaaaacgtgcgagagaatgaatcagaatttcaacatttgcttcacacacggggtcagagactgctcagagtgtttccccggcgtgtcagaatctcaaccggtcgtcagaaagaggacgtatcggaaactctgtgcgattcatcatctgctggggcgggctcccgagattgcttgctcggcctgcgatctggtcaacgtggacctggatgactgtgtttctgagcaataaatgacttaaaccaggtatggctgccgatggttatcttccagattggctcgaggacaacctctctgagggcattcgcgagtggtgggcgctgaaacctggagccccgaagcccaaagccaaccagcaaaagcaggacgacggccggggtctggtgcttcctggctacaagtacctcggacccttcaacggactcgacaagggggagcccgtcaacgcggcggacgcagcggccctcgagcacgacaaggcctacgaccagcagctgcaggcgggtgacaatccgtacctgcggtataaccacgccgacgccgagtttcaggagcgtctgcaagaagatacgtcttttgggggcaacctcgggcgagcagtcttccaggccaagaagcgggttctcgaacctctcggtctggttgaggaaggcgctaagacggctcctggaaagaagagaccggtagagccatcaccccagcgttctccagactcctctacgggcatcggcaagaaaggccaacagcccgccagaaaaagactcaattttggtcagactggcgactcagagtcagttccagaccctcaacctctcggagaacctccagcagcgccctctggtgtgggacctaatacaatggctgcaggcggtggcgcaccaatggcagacaataacgaaggcgccgacggagtgggtagttcctcgggaaattggcattgcgattccacatggctgggcgacagagtcatcaccaccagcacccgaacctgggccctgcccacctacaacaaccacctctacaagcaaatctccaacgggacatcgggaggagccaccaacgacaacacctacttcggctacagcaccccctgggggtattttgactttaacagattccactgccacttttcaccacgtgactggcagcgactcatcaacaacaactggggattccggcccaagagactcagcttcaagctcttcaacatccaggtcaaggaggtcacgcagaatgaaggcaccaagaccatcgccaataacctcaccagcaccatccaggtgtttacggactcggagtaccagctgccgtacgttctcggctctgcccaccagggctgcctgcctccgttcccggcggacgtgttcatgattccccagtacggctacctaacactcaacaacggtagtcaggccgtgggacgctcctccttctactgcctggaatactttccttcgcagatgctgagaaccggcaacaacttccagtttacttacaccttcgaggacgtgcctttccacagcagctacgcccacagccagagcttggaccggctgatgaatcctctgattgaccagtacctgtactacttgtctcggactcaaacaacaggaggcacggcaaatacgcagactctgggcttcagccaaggtgggcctaatacaatggccaatcaggcaaagaactggctgccaggaccctgttaccgccaacaacgcgtctcaacgacaaccgggcaaaacaacaatagcaactttgcctggactgctgggaccaaataccatctgaatggaagaaattcattggctaatcctggcatcgctatggcaacacacaaagacgacgaggagcgtttttttcccagtaacgggatcctgatttttggcaaacaaaatgctgccagagacaatgcggattacagcgatgtcatgctcaccagcgaggaagaaatcaaaaccactaaccctgtggctacagaggaatacggtatcgtggcagataacttgcagcagcaaaacacggctcctcaaattggaactgtcaacagccagggggccttacccggtatggtctggcagaaccgggacgtgtacctgcagggtcccatctgggccaagattcctcacacggacggcaacttccacccgtctccgctgatgggcggctttggcctgaaacatcctccgcctcagatcctgatcaagaacacgcctgtacctgcggatcctccgaccaccttcaaccagtcaaagctgaactctttcatcacgcaatacagcaccggacaggtcagcgtggaaattgaatgggagctgcagaaggaaaacagcaagcgctggaaccccgagatccagtacacctccaactactacaaatctacaagtgtggactttgctgttaatacagaaggcgtgtactctgaaccccgccccattggcacccgttacctcacccgtaatctgtaattgcctgttaatcaataaaccggttgattcgtttcagttgaactttggtctctgcg

SEQ ID NO: 114 - protein, 738 aa, Adeno-associated virus 8; identical to SEQ ID NO: 105

SEQ ID NO: 115 - protein, 737 aa, Adeno-associated virus 8
MAADGYLPDWLEDNLSEGIREWWALKPGAPKPKANQQKQDDGRGLVLPGYKYLGPFNGLDKGEPVNAADAAALEHDKAYDQQLQAGDNPYLRYNHADAEFQERLQEDTSFGGNLGRAVFQAKKRVLEPLGLVEEGAKTAPGKKRPVEPSPQRSPDSSTGIGKKGQQPARKRLNFGQTGDSESVPDPQPLGEPPAAPSGVGPNTMAAGGGAPMADNNEGADGVGSSSGNWHCDSTWLGDRVITTSTRTWALPTYNNHLYKQISNGTSGGATNDNTYFGYSTPWGYFDFNRFHCHFSPRDWQRLINNNWGFRPKRLSFKLFNIQVKEVTQNEGTKTIANNLTSTIQVFTDSEYQLPYVLGSAHQGCLPPFPADVFMIPQYGYLTLNNGSQAVGRSSFYCLEYFPSQMLRTGNNFQFTYTFEDVPFHSSYAHSQSLDRLMNPLIDQYLYYLSRTQTTGGTANTQTLGFSQGGPNTMANQAKNWLPGPCYRQQRVSTTTGQNNNSNFAWTAGTKYHLNGRNSLANPGIAMATHKDDEERFFPSNGILIFGKQNAARDNADYSDVMLTSEEEIKTTNPVATEEYGIVADNLQQQNTAPQIGTVNSQGALPGMVWQNRDVYLQGPIWAKIPHTDGNFHPSPLMGGFGLKHPPPQILIKNTPVPADPPTTFNQSKLNSFITQYSTGQVSVEIEWELQKENSKRWNPEIQYTSNYYKSTSVDFAVIQKACTLNPAPLAPVTSPVI

SEQ ID NO: 116 - DNA, 2217 bp, Adeno-associated virus 8; identical to SEQ ID NO: 111

SEQ ID NO: 117 - DNA, 2214 bp, Artificial Sequence
  Description of Artificial Sequence: Synthetic polynucleotide
atggctgccgatggttatcttccagattggctcgaggacaacctctctgagggcattcgcgagtggtgggcgctgaaacctggagccccgaagcccaaagccaaccagcaaaagcaggacgacggccggggtctggtgcttcctggctacaagtacctcggacccttcaacggactcgacaagggggagcccgtcaacgcggcggacgcagcggccctcgagcacgacaaggcctacgaccagcagctgcaggcgggtgacaatccgtacctgcggtataaccacgccgacgccgagtttcaggagcgtctgcaagaagatacgtcttttgggggcaacctcgggcgagcagtcttccaggccaagaagcgggttctcgaacctctcggtctggttgaggaaggcgctaagacggctcctggaaagaagagaccggtagagccatcaccccagcgttctccagactcctctacgggcatcggcaagaaaggccaacagcccgccagaaaaagactcaattttggtcagactggcgactcagagtcagttccagaccctcaacctctcggagaacctccagcagcgccctctggtgtgggacctaatacaatggctgcaggcggtggcgcaccaatggcagacaataacgaaggcgccgacggagtgggtagttcctcgggaaattggcattgcgattccacatggctgggcgacagagtcatcaccaccagcacccgaacctgggccctgcccacctacaacaaccacctctacaagcaaatctccaacgggacatcgggaggagccaccaacgacaacacctacttcggctacagcaccccctgggggtattttgactttaacagattccactgccacttttcaccacgtgactggcagcgactcatcaacaacaactggggattccggcccaagagactcagcttcaagctcttcaacatccaggtcaaggaggtcacgcagaatgaaggcaccaagaccatcgccaataacctcaccagcaccatccaggtgtttacggactcggagtaccagctgccgtacgttctcggctctgcccaccagggctgcctgcctccgttcccggcggacgtgttcatgattccccagtacggctacctaacactcaacaacggtagtcaggccgtgggacgctcctccttctactgcctggaatactttccttcgcagatgctgagaaccggcaacaacttccagtttacttacaccttcgaggacgtgcctttccacagcagctacgcccacagccagagcttggaccggctgatgaatcctctgattgaccagtacctgtactacttgtctcggactcaaacaacaggaggcacggcaaatacgcagactctgggcttcagccaaggtgggcctaatacaatggccaatcaggcaaagaactggctgccaggaccctgttaccgccaacaacgcgtctcaacgacaaccgggcaaaacaacaatagcaactttgcctggactgctgggaccaaataccatctgaatggaagaaattcattggctaatcctggcatcgctatggcaacacacaaagacgacgaggagcgtttttttcccagtaacgggatcctgatttttggcaaacaaaatgctgccagagacaatgcggattacagcgatgtcatgctcaccagcgaggaagaaatcaaaaccactaaccctgtggctacagaggaatacggtatcgtggcagataacttgcctgagcggacggcgatgagtcttccgggaactgtcaacagccagggggccttacccggtatggtctggcagaaccgggacgtgtacctgcagggtcccatctgggccaagattcctcacacggacggcaacttccacccgtctccgctgatgggcggctttggcctgaaacatcctccgcctcagatcctgatcaagaacacgcctgtacctgcggatcctccgaccaccttcaaccagtcaaagctgaactctttcatcacgcaatacagcaccggacaggtcagcgtggaaattgaatgggagctgcagaaggaaaacagcaagcgctggaaccccgagatccagtacacctccaactactacaaatctacaagtgtggactttgctgttaatacagaaggcgtgtactctgaaccccgccccattggcacccgttacctcacccgtaatctg

SEQ ID NO: 118 - protein, 738 aa, Artificial Sequence
  Description of Artificial Sequence: Synthetic polypeptide
MAADGYLPDWLEDNLSEGIREWWALKPGAPKPKANQQKQDDGRGLVLPGYKYLGPFNGLDKGEPVNAADAAALEHDKAYDQQLQAGDNPYLRYNHADAEFQERLQEDTSFGGNLGRAVFQAKKRVLEPLGLVEEGAKTAPGKKRPVEPSPQRSPDSSTGIGKKGQQPARKRLNFGQTGDSESVPDPQPLGEPPAAPSGVGPNTMAAGGGAPMADNNEGADGVGSSSGNWHCDSTWLGDRVITTSTRTWALPTYNNHLYKQISNGTSGGATNDNTYFGYSTPWGYFDFNRFHCHFSPRDWQRLINNNWGFRPKRLSFKLFNIQVKEVTQNEGTKTIANNLTSTIQVFTDSEYQLPYVLGSAHQGCLPPFPADVFMIPQYGYLTLNNGSQAVGRSSFYCLEYFPSQMLRTGNNFQFTYTFEDVPFHSSYAHSQSLDRLMNPLIDQYLYYLSRTQTTGGTANTQTLGFSQGGPNTMANQAKNWLPGPCYRQQRVSTTTGQNNNSNFAWTAGTKYHLNGRNSLANPGIAMATHKDDEERFFPSNGILIFGKQNAARDNADYSDVMLTSEEEIKTTNPVATEEYGIVADNLPERTAMSLPGTVNSQGALPGMVWQNRDVYLQGPIWAKIPHTDGNFHPSPLMGGFGLKHPPPQILIKNTPVPADPPTTFNQSKLNSFITQYSTGQVSVEIEWELQKENSKRWNPEIQYTSNYYKSTSVDFAVNTEGVYSEPRPIGTRYLTRNL

SEQ ID NO: 119 - DNA, 2214 bp, Artificial Sequence
  Description of Artificial Sequence: Synthetic polynucleotide
atggctgccgatggttatcttccagattggctcgaggacaacctctctgagggcattcgcgagtggtgggcgctgaaacctggagccccgaagcccaaagccaaccagcaaaagcaggacgacggccggggtctggtgcttcctggctacaagtacctcggacccttcaacggactcgacaagggggagcccgtcaacgcggcggacgcagcggccctcgagcacgacaaggcctacgaccagcagctgcaggcgggtgacaatccgtacctgcggtataaccacgccgacgccgagtttcaggagcgtctgcaagaagatacgtcttttgggggcaacctcgggcgagcagtcttccaggccaagaagcgggttctcgaacctctcggtctggttgaggaaggcgctaagacggctcctggaaagaagagaccggtagagccatcaccccagcgttctccagactcctctacgggcatcggcaagaaaggccaacagcccgccagaaaaagactcaattttggtcagactggcgactcagagtcagttccagaccctcaacctctcggagaacctccagcagcgccctctggtgtgggacctaatacaatggctgcaggcggtggcgcaccaatggcagacaataacgaaggcgccgacggagtgggtagttcctcgggaaattggcattgcgattccacatggctgggcgacagagtcatcaccaccagcacccgaacctgggccctgcccacctacaacaaccacctctacaagcaaatctccaacgggacatcgggaggagccaccaacgacaacacctacttcggctacagcaccccctgggggtattttgactttaacagattccactgccacttttcaccacgtgactggcagcgactcatcaacaacaactggggattccggcccaagagactcagcttcaagctcttcaacatccaggtcaaggaggtcacgcagaatgaaggcaccaagaccatcgccaataacctcaccagcaccatccaggtgtttacggactcggagtaccagctgccgtacgttctcggctctgcccaccagggctgcctgcctccgttcccggcggacgtgttcatgattccccagtacggctacctaacactcaacaacggtagtcaggccgtgggacgctcctccttctactgcctggaatactttccttcgcagatgctgagaaccggcaacaacttccagtttacttacaccttcgaggacgtgcctttccacagcagctacgcccacagccagagcttggaccggctgatgaatcctctgattgaccagtacctgtactacttgtctcggactcaaacaacaggaggcacggcaaatacgcagactctgggcttcagccaaggtgggcctaatacaatggccaatcaggcaaagaactggctgccaggaccctgttaccgccaacaacgcgtctcaacgacaaccgggcaaaacaacaatagcaactttgcctggactgctgggaccaaataccatctgaatggaagaaattcattggctaatcctggcatcgctatggcaacacacaaagacgacgaggagcgtttttttcccagtaacgggatcctgatttttggcaaacaaaatgctgccagagacaatgcggattacagcgatgtcatgctcaccagcgaggaagaaatcaaaaccactaaccctgtggctacagaggaatacggtatcgtggcagataacttgagttttagtcgtgcggttctttgtgatggaactgtcaacagccagggggccttacccggtatggtctggcagaaccgggacgtgtacctgcagggtcccatctgggccaagattcctcacacggacggcaacttccacccgtctccgctgatgggcggctttggcctgaaacatcctccgcctcagatcctgatcaagaacacgcctgtacctgcggatcctccgaccaccttcaaccagtcaaagctgaactctttcatcacgcaatacagcaccggacaggtcagcgtggaaattgaatgggagctgcagaaggaaaacagcaagcgctggaaccccgagatccagtacacctccaactactacaaatctacaagtgtggactttgctgttaatacagaaggcgtgtactctgaaccccgccccattggcacccgttacctcacccgtaatctg

SEQ ID NO: 120 - protein, 738 aa, Artificial Sequence
  Description of Artificial Sequence: Synthetic polypeptide
MAADGYLPDWLEDNLSEGIREWWALKPGAPKPKANQQKQDDGRGLVLPGYKYLGPFNGLDKGEPVNAADAAALEHDKAYDQQLQAGDNPYLRYNHADAEFQERLQEDTSFGGNLGRAVFQAKKRVLEPLGLVEEGAKTAPGKKRPVEPSPQRSPDSSTGIGKKGQQPARKRLNFGQTGDSESVPDPQPLGEPPAAPSGVGPNTMAAGGGAPMADNNEGADGVGSSSGNWHCDSTWLGDRVITTSTRTWALPTYNNHLYKQISNGTSGGATNDNTYFGYSTPWGYFDFNRFHCHFSPRDWQRLINNNWGFRPKRLSFKLFNIQVKEVTQNEGTKTIANNLTSTIQVFTDSEYQLPYVLGSAHQGCLPPFPADVFMIPQYGYLTLNNGSQAVGRSSFYCLEYFPSQMLRTGNNFQFTYTFEDVPFHSSYAHSQSLDRLMNPLIDQYLYYLSRTQTTGGTANTQTLGFSQGGPNTMANQAKNWLPGPCYRQQRVSTTTGQNNNSNFAWTAGTKYHLNGRNSLANPGIAMATHKDDEERFFPSNGILIFGKQNAARDNADYSDVMLTSEEEIKTTNPVATEEYGIVADNLSFSRAVLCDGTVNSQGALPGMVWQNRDVYLQGPIWAKIPHTDGNFHPSPLMGGFGLKHPPPQILIKNTPVPADPPTTFNQSKLNSFITQYSTGQVSVEIEWELQKENSKRWNPEIQYTSNYYKSTSVDFAVNTEGVYSEPRPIGTRYLTRNL

SEQ ID NO: 121 - DNA, 4385 bp, Adeno-associated virus 9
cagagagggagtggccaactccatcactaggggtaatcgcgaagcgcctcccacgctgccgcgtcagcgctgacgtagattacgtcataggggagtggtcctgtattagctgtcacgtgagtgcttttgcgacattttgcgacaccacatggccatttgaggtatatatggccgagtgagcgagcaggatctccattttgaccgcgaaatttgaacgagcagcagccatgccgggcttctacgagattgtgatcaaggtgccgagcgacctggacgagcacctgccgggcatttctgactcttttgtgaactgggtggccgagaaggaatgggagctgcccccggattctgacatggatcggaatctgatcgagcaggcacccctgaccgtggccgagaagctgcagcgcgacttcctggtccaatggcgccgcgtgagtaaggccccggaggccctcttctttgttcagttcgagaagggcgagagctactttcacctgcacgttctggtcgagaccacgggggtcaagtccatggtgctaggccgcttcctgagtcagattcgggagaagctggtccagaccatctaccgcgggatcgagccgaccctgcccaactggttcgcggtgaccaagacgcgtaatggcgccggcggggggaacaaggtggtggacgagtgctacatccccaactacctcctgcccaagactcagcccgagctgcagtgggcgtggactaacatggaggagtatataagcgcgtgcttgaacctggccgagcgcaaacggctcgtggcgcagcacctgacccacgtcagccagacgcaggagcagaacaaggagaatctgaaccccaattctgacgcgcccgtgatcaggtcaaaaacctccgcgcgctacatggagctggtcgggtggctggtggaccggggcatcacctccgagaagcagtggatccaggaggaccaggcctcgtacatctccttcaacgccgcctccaactcgcggtcccagatcaaggccgcgctggacaatgccggcaagatcatggcgctgaccaaatccgcgcccgactacctggtaggcccttcacttccggtggacattacgcagaaccgcatctaccgcatcctgcagctcaacggctacgaccctgcctacgccggctccgtctttctcggctgggcacaaaagaagttcgggaaacgcaacaccatctggctgtttgggccggccaccacgggaaagaccaacatcgcagaagccattgcccacgccgtgcccttctacggctgcgtcaactggaccaatgagaactttcccttcaacgattgcgtcgacaagatggtgatctggtgggaggagggcaagatgacggccaaggtcgtggagtccgccaaggccattctcggcggcagcaaggtgcgcgtggaccaaaagtgcaagtcgtccgcccagatcgaccccactcccgtgatcgtcacctccaacaccaacatgtgcgccgtgattgacgggaacagcaccaccttcgagcaccagcagcctctccaggaccggatgtttaagttcgaactcacccgccgtctggagcacgactttggcaaggtgacaaagcaggaagtcaaagagttcttccgctgggccagtgatcacgtgaccgaggtggcgcatgagttttacgtcagaaagggcggagccagcaaaagacccgcccccgatgacgcggataaaagcgagcccaagcgggcctgcccctcagtcgcggatccatcgacgtcagacgcggaaggagctccggtggactttgccgacaggtaccaaaacaaatgttctcgtcacgcgggcatgcttcagatgctgcttccctgcaaaacgtgcgagagaatgaatcagaatttcaacatttgcttcacacacggggtcagagactgctcagagtgtttccccggcgtgtcagaatctcaaccggtcgtcagaaagaggacgtatcggaaactctgtgcgattcatcatctgctggggcgggctcccgagattgcttgctcggcctgcgatctggtcaacgtggacctggatgactgtgtttctgagcaataaatgacttaaaccaggtatggctgccgatggttatcttccagattggctcgaggacaacctctctgagggcattcgcgagtggtgggcgctgaaacctggagccccgaagcccaaagccaaccagcaaaagcaggacgacggccggggtctggtgcttcctggctacaagtacctcggacccttcaacggactcgacaagggggagcccgtcaacgcggcggacgcagcggccctcgagcacggcaaggcctacgaccagcagctgcaggcgggtgacaatccgtacctgcggtataaccacgccgacgccgagtttcaggagcgtctgcaagaagatacgtcttttgggggcaacctcgggcgagcagtcttccaggccaagaagcgggttctcgaacctctcggtctggttgaggaaggcgctaagacggctcctggaaagaagagaccggtagagccatcaccccagcgttctccagactcctctacgggcatcggcaagaaaggccaacagcccgccagaaaaagactcaattttggtcagactggcgactcagagtcagttccagaccctcaacctctcggagaacctccagcagcgccctctggtgtgggacctaatacaatggctgcaggcggtggcgcaccaatggcagacaataacgaaggcgccgacggagtgggtaattcctcgggaaattggcattgcgattccacatggctgggggacagagtcatcaccaccagcacccgaacctgggcattgcccacctacaacaaccacctctacaagcaaatctccaatggaacatcgggaggaagcaccaacgacaacacctactttggctacagcaccccctgggggtattttgacttcaacagattccactgccacttctcaccacgtgactggcagcgactcatcaacaacaactggggattccggccaaagagactcaacttcaagctgttcaacatccaggtcaaggaggttacgacgaacgaaggcaccaagaccatcgccaataaccttaccagcaccgtccaggtctttacggactcggagtaccagctaccgtacgtcctaggctctgcccaccaaggatgcctgccaccgtttcctgcagacgtcttcatggttcctcagtacggctacctgacgctcaacaatggaagtcaagcgttaggacgttcttctttctactgtctggaatacttcccttctcagatgctgagaaccggcaacaactttcagttcagctacactttcgaggacgtgcctttccacagcagctacgcacacagccagagtctagatcgactgatgaaccccctcatcgaccagtacctatactacctggtcagaacacagacaactggaactgggggaactcaaactttggcattcagccaagcaggccctagctcaatggccaatcaggctagaaactgggtacccgggccttgctaccgtcagcagcgcgtctccacaaccaccaaccaaaataacaacagcaactttgcgtggacgggagctgctaaattcaagctgaacgggagagactcgctaatgaatcctggcgtggctatggcatcgcacaaagacgacgaggaccgcttctttccatcaagtggcgttctcatatttggcaagcaaggagccgggaacgatggagtcgactacagccaggtgctgattacagatgaggaagaaattaaagccaccaaccctgtagccacagaggaatacggagcagtggccatcaacaaccaggccgctaacacgcaggcgcaaactggacttgtgcataaccagggagttattcctggtatggtctggcagaaccgggacgtgtacctgcagggccctatttgggctaaaatacctcacacagatggcaactttcacccgtctcctctgatgggtggatttggactgaaacacccacctccacagattctaattaaaaatacaccagtgccggcagatcctcctcttaccttcaatcaagccaagctgaactctttcatcacgcagtacagcacgggacaagtcagcgtggaaatcgagtgggagctgcagaaagaaaacagcaagcgctggaatccagagatccagtatacttcaaactactacaaatctacaaatgtggactttgctgtcaataccaaaggtgtttactctgagcctcgccccattggtactcgttacctcacccgtaatttgtaattgcctgttaatcaataaaccggttaattcgtttcagttgaactttggtctctgcg

SEQ ID NO: 122 - DNA, 4382 bp, Adeno-associated virus 9
cagagagggagtggccaactccatcactaggggtaatcgcgaagcgcctcccacgctgccgcgtcagcgctgacgtagattacgtcataggggagtggtcctgtattagctgtcacgtgagtgcttttgcgacattttgcgacaccacatggccatttgaggtatatatggccgagtgagcgagcaggatctccattttgaccgcgaaatttgaacgagcagcagccatgccgggcttctacgagattgtgatcaaggtgccgagcgacctggacgagcacctgccgggcatttctgactcttttgtgaactgggtggccgagaaggaatgggagctgcccccggattctgacatggatcggaatctgatcgagcaggcacccctgaccgtggccgagaagctgtagcgcgacttcctggtccaatggcgccgcgtgagtaaggccccggaggccctcttctttgttcagttcgagaagggcgagagctactttcacctgcacgttctggtcgagaccacgggggtcaagtccatggtgctaggccgcttcctgagtcagattcgggagaagctggtccagaccatctaccgcgggatcgagccgaccctgcccaactggttcgcggtgaccaagacgcgtaatggcgccggcggggggaacaaggtggtggacgagtgctacatccccaactacctcctgcccaagactcagcccgagctgcagtgggcgtggactaacatggaggagtatataagcgcgtgcttgaacctggccgagcgcaaacggctcgtggcgcagcacctgacccacgtcagccagacgcaggagcagaacaaggagaatctgaaccccaattctgacgcgcccgtgatcaggtcaaaaacctccgcgcgctacatggagctggtcgggtggctggtggaccggggcatcacctccgagaagcagtggatccaggaggaccaggcctcgtacatctccttcaacgccgcctccaactcgcggtcccagatcaaggccgcgctggacaatgccggcaagatcatggcgctgaccaaatccgcgcccgactacctggtaggcccttcacttccggtggacattacgcagaaccgcatctaccgcatcctgcagctcaacggctacgaccctgcctacgccggctccgtctttctcggctgggcacaaaagaagttcgggaaacgcaacaccatctggctgtttgggccggccaccacgggaaagaccaacatcgcagaagccattgcccacgccgtgcccttctacggctgcgtcaactggaccaatgagaactttcccttcaacgattgcgtcgacaagatggtgatctggtgggaggagggcaagatgacggccaaggtcgtggagtccgccaaggccattctcggcggcagcaaggtgcgcgtggaccaaaagtgcaagtcgtccgcccagatcgaccccactcccgtgatcgtcacctccaacaccaacatgtgcgccgtgattgacgggaacagcaccaccttcgagcaccagcagcctctccaggaccggatgtttaagttcgaactcacccgccgtctggagcacgactttggcaaggtgacaaagcaggaagtcaaagagttcttccgctgggccagtgatcacgtgaccgaggtggcgcatgagttttacgtcagaaagggcggagccagcaaaagacccgcccccgatgacgcggataaaagcgagcccaagcgggcctgcccctcagtcgcggatccatcgacgtcagacgcggaaggagctccggtggactttgccgacaggtaccaaaacaaatgttctcgtcacgcgggcatgcttcagatgctgcttccctgcaaaacgtgcgagagaatgaatcagaatttcaacatttgcttcacacacggggtcagagactgctcagagtgtttccccggcgtgtcagaatctcaaccggtcgtcagaaagaggacgtatcggaaactctgtgcgattcatcatctgctggggcgggctcccgagattgcttgctcggcctgcgatctggtcaacgtggacctggatgactgtgtttctgagcaataaatgacttaaaccaggtatggctgccgatggttatcttccagattggctcgaggacaacctctctgagggcattcgcgagtggtgggacctgaaacctggagccccgaaacccaaagccaaccagcaaaagcaggacgacggccggggtctggtgcttcctggctacaagtacctcggacccttcaacggactcgacaagggggagcccgtcaacgcggcggacgcagcggccctcgagcacgacaaggcctacgaccagcagctcaaagcgggtgacaatccgtacctgcggtataaccacgccgacgccgagtttcaggagcgtctgcaagaagatacgtcttttgggggcaacctcgggcgagcagtcttccaggccaagaagcgggttctcgaacctctcggtctggttgaggaaggcgctaagacggctcctggaaagaagagaccggtagagcagtcaccccaagaaccagactcatcctcgggcatcggcaaatcaggccagcagcccgctaaaaagagactcaattttggtcagactggcgactcagagtcagtccccgacccacaacctctcggagaacctccagaagccccctcaggtctgggacctaatacaatggcttcaggcggtggcgctccaatggcagacaataacgaaggcgccgacggagtgggtaattcctcgggaaattggcattgcgattccacatggctgggggacagagtcatcaccaccagcacccgaacctgggcattgcccacctacaacaaccacctctacaagcaaatctccaatggaacatcgggaggaagcaccaacgacaacacctactttggctacagcaccccctgggggtattttgacttcaacagattccactgccacttctcaccacgtgactggcagcgactcatcaacaacaactggggattccggccaaagagactcaacttcaagctgttcaacatccaggtcaaggaggttacgacgaacgaaggcaccaagaccatcgccaataaccttaccagcaccgtccaggtctttacggactcggagtaccagctaccgtacgtcctaggctctgcccaccaaggatgcctgccaccgtttcctgcagacgtcttcatggttcctcagtacggctacctgacgctcaacaatggaagtcaagcgttaggacgttcttctttctactgtctggaatacttcccttctcagatgctgagaaccggcaacaactttcagttcagctacactttcgaggacgtgcctttccacagcagctacgcacacagccagagtctagatcgactgatgaaccccctcatcgaccagtacctatactacctggtcagaacacagacaactggaactgggggaactcaaactttggcattcagccaagcaggccctagctcaatggccaatcaggctagaaactgggtacccgggccttgctaccgtcagcagcgcgtctccacaaccaccaaccaaaataacaacagcaactttgcgtggacgggagctgctaaattcaagctgaacgggagagactcgctaatgaatcctggcgtggctatggcatcgcacaaagacgacgaggaccgcttctttccatcaagtggcgttctcatatttggcaagcaaggagccgggaacgatggagtcgactacagccaggtgctgattacagatgaggaagaaattaaagccaccaaccctgtagccacagaggaatacggagcagtggccatcaacaaccaggccgctaacacgcaggcgcaaactggacttgtgcataaccagggagttattcctggtatggtctggcagaaccgggacgtgtacctgcagggccctatttgggctaaaatacctcacacagatggcaactttcacccgtctcctctgatgggtggatttggactgaaacacccacctccacagattctaattaaaaatacaccagtgccggcagatcctcctcttaccttcaatcaagccaagctgaactctttcatcacgcagtacagcacgggacaagtcagcgtggaaatcgagtgggagctgcagaaagaaaacagcaagcgctggaatccagagatccagtatacttcaaactactacaaatctacaaatgtggactttgctgtcaataccgaaggtgtttactctgagcctcgccccattggtactcgttacctcacccgtaatttgtaattgcctgttaatcaataaaccggttaattcgtttcagttgaactttggtctctgcg

SEQ ID NO: 123 - protein, 736 aa, Adeno-associated virus 9
MAADGYLPDWLEDNLSEGIREWWALKPGAPQPKANQQHQDNARGLVLPGYKYLGPGNGLDKGEPVNAADAAALEHDKAYDQQLKAGDNPYLKYNHADAEFQERLKEDTSFGGNLGRAVFQAKKRLLEPLGLVEEAAKTAPGKKRPVEQSPQEPDSSAGIGKSGAQPAKKRLNFGQTGDTESVPDPQPIGEPPAAPSGVGSLTMASGGGAPVADNNEGADGVGSSSGNWHCDSQWLGDRVITTSTRTWALPTYNNHLYKQISNSTSGGSSNDNAYFGYSTPWGYFDFNRFHCHFSPRDWQRLINNNWGFRPKRLNFKLFNIQVKEVTDNNGVKTIANNLTSTVQVFTDSDYQLPYVLGSAHEGCLPPFPADVFMIPQYGYLTLNDGSQAVGRSSFYCLEYFPSQMLRTGNNFQFSYEFENVPFHSSYAHSQSLDRLMNPLIDQYLYYLSKTINGSGQNQQTLKFSVAGPSNMAVQGRNYIPGPSYRQQRVSTTVTQNNNSEFAWPGASSWALNGRNSLMNPGPAMASHKEGEDRFFPLSGSLIFGKQGTGRDNVDADKVMITNEEEIKTTNPVATESYGQVATNHQSAQAQAQTGWVQNQGILPGMVWQDRDVYLQGPIWAKIPHTDGNFHPSPLMGGFGMKHPPPQILIKNTPVPADPPTAFNKDKLNSFITQYSTGQVSVEIEWELQKENSKRWNPEIQYTSNYYKSNNVEFAVNTEGVYSEPRPIGTRYLTRNL

SEQ ID NO: 124 - protein, 736 aa, Adeno-associated virus 9
MAADGYLPDWLEDNLSEGIREWWDLKPGAPKPKANQQKQDDGRGLVLPGYKYLGPFNGLDKGEPVNAADAAALEHDKAYDQQLKAGDNPYLRYNHADAEFQERLQEDTSFGGNLGRAVFQAKKRVLEPLGLVEEGAKTAPGKKRPVEQSPQEPDSSSGIGKSGQQPAKKRLNFGQTGDSESVPDPQPLGEPPEAPSGLGPNTMASGGGAPMADNNEGADGVGNSSGNWHCDSTWLGDRVITTSTRTWALPTYNNHLYKQISNGTSGGSTNDNTYFGYSTPWGYFDFNRFHCHFSPRDWQRLINNNWGFRPKRLNFKLFNIQVKEVTTNEGTKTIANNLTSTVQVFTDSEYQLPYVLGSAHQGCLPPFPADVFMVPQYGYLTLNNGSQALGRSSFYCLEYFPSQMLRTGNNFQFSYTFEDVPFHSSYAHSQSLDRLMNPLIDQYLYYLVRTQTTGTGGTQTLAFSQAGPSSMANQARNWVPGPCYRQQRVSTTTNQNNNSNFAWTGAAKFKLNGRDSLMNPGVAMASHKDDEDRFFPSSGVLIFGKQGAGNDGVDYSQVLITDEEEIKATNPVATEEYGAVAINNQAANTQAQTGLVHNQGVIPGMVWQNRDVYLQGPIWAKIPHTDGNFHPSPLMGGFGLKHPPPQILIKNTPVPADPPLTFNQAKLNSFITQYSTGQVSVEIEWELQKENSKRWNPEIQYTSNYYKSTNVDFAVNTEGVYSEPRPIGTRYLTRNL

SEQ ID NO: 125 - protein, 623 aa, Adeno-associated virus 9
MPGFYEIVIKVPSDLDEHLPGISDSFVNWVAEKEWELPPDSDMDRNLIEQAPLTVAEKLQRDFLVQWRRVSKAPEALFFVQFEKGESYFHLHVLVETTGVKSMVLGRFLSQIREKLVQTIYRGIEPTLPNWFAVTKTRNGAGGGNKVVDECYIPNYLLPKTQPELQWAWTNMEEYISACLNLAERKRLVAQHLTHVSQTQEQNKENLNPNSDAPVIRSKTSARYMELVGWLVDRGITSEKQWIQEDQASYISFNAASNSRSQIKAALDNAGKIMALTKSAPDYLVGPSLPVDITQNRIYRILQLNGYDPAYAGSVFLGWAQKKFGKRNTIWLFGPATTGKTNIAEAIAHAVPFYGCVNWTNENFPFNDCVDKMVIWWEEGKMTAKVVESAKAILGGSKVRVDQKCKSSAQIDPTPVIVTSNTNMCAVIDGNSTTFEHQQPLQDRMFKFELTRRLEHDFGKVTKQEVKEFFRWASDHVTEVAHEFYVRKGGASKRPAPDDADKSEPKRACPSVADPSTSDAEGAPVDFADRYQNKCSRHAGMLQMLLPCKTCERMNQNFNICFTHGVRDCSECFPGVSESQPVVRKRTYRKLCAIHHLLGRAPEIACSACDLVNVDLDDCVSEQ

SEQ ID NO: 126 - DNA, 2211 bp, Adeno-associated virus
atggctgccgatggttatcttccagattggctcgaggacaaccttagtgaaggaattcgcgagtggtgggctttgaaacctggagcccctcaacccaaggcaaatcaacaacatcaagacaacgctcgaggtcttgtgcttccgggttacaaataccttggacccggcaacggactcgacaagggggagccggtcaacgcagcagacgcggcggccctcgagcacgacaaggcctacgaccagcagctcaaggccggagacaacccgtacctcaagtacaaccacgccgacgccgagttccaggagcggctcaaagaagatacgtcttttgggggcaacctcgggcgagcagtcttccaggccaaaaagaggcttcttgaacctcttggtctggttgaggaagcggctaagacggctcctggaaagaagaggcctgtagagcagtctcctcaggaaccggactcctccgcgggtattggcaaatcgggtgcacagcccgctaaaaagagactcaatttcggtcagactggcgacacagagtcagtcccagaccctcaaccaatcggagaacctcccgcagccccctcaggtgtgggatctcttacaatggcttcaggtggtggcgcaccagtggcagacaataacgaaggtgccgatggagtgggtagttcctcgggaaattggcattgcgattcccaatggctgggggacagagtcatcaccaccagcacccgaacctgggccctgcccacctacaacaatcacctctacaagcaaatctccaacagcacatctggaggatcttcaaatgacaacgcctacttcggctacagcaccccctgggggtattttgacttcaacagattccactgccacttctcaccacgtgactggcagcgactcatcaacaacaactggggattccggcctaagcgactcaacttcaagctcttcaacattcaggtcaaagaggttacggacaacaatggagtcaagaccatcgccaataaccttaccagcacggtccaggtcttcacggactcagactatcagctcccgtacgtgctcgggtcggctcacgagggctgcctcccgccgttcccagcggacgttttcatgattcctcagtacgggtatctgacgcttaatgatggaagccaggccgtgggtcgttcgtccttttactgcctggaatatttcccgtcgcaaatgctaagaacgggtaacaacttccagttcagctacgagtttgagaacgtacctttccatagcagctacgctcacagccaaagcctggaccgactaatgaatccactcatcgaccaatacttgtactatctctcaaagactattaacggttctggacagaatcaacaaacgctaaaattcagtgtggccggacccagcaacatggctgtccagggaagaaactacatacctggacccagctaccgacaacaacgtgtctcaaccactgtgactcaaaacaacaacagcgaatttgcttggcctggagcttcttcttgggctctcaatggacgtaatagcttgatgaatcctggacctgctatggccagccacaaagaaggagaggaccgtttctttcctttgtctggatctttaatttttggcaaacaaggaactggaagagacaacgtggatgcggacaaagtcatgataaccaacgaagaagaaattaaaactactaacccggtagcaacggagtcctatggacaagtggccacaaaccaccagagtgcccaagcacaggcgcagaccggctgggttcaaaaccaaggaatacttccgggtatggtttggcaggacagagatgtgtacctgcaaggacccatttgggccaaaattcctcacacggacggcaactttcacccttctccgctgatgggagggtttggaatgaagcacccgcctcctcagatcctcatcaaaaacacacctgtacctgcggatcctccaacggccttcaacaaggacaagctgaactctttcatcacccagtattctactggccaagtcagcgtggagatcgagtgggagctgcagaaggaaaacagcaagcgctggaacccggagatccagtacacttccaactattacaagtctaataatgttgaatttgctgttaatactgaaggtgtatatagtgaaccccgccccattggcaccagatacctgactcgtaatctgtaa

SEQ ID NO: 127 - protein, 736 aa, Adeno-associated virus; identical to SEQ ID NO: 123

SEQ ID NO: 128 - DNA, 2460 bp, Adeno-associated virus
ggtaattcctccggaaattggcattgcgattccacatggctgggcgaccgagtcattaccaccagcacccggacttgggccctgcccacctacaacaaccacctctacaagcaaatctccagccaatcgggtgccaccaacgacaaccactacttcggctacagcaccccttgggggtattttgatttcaacagattccactgccatttctcaccacgtgactggcagcgactcatcaacaacaactggggattcatggctgccgatggttatcttccagattggctcgaggacactctctctgaaggaatcagacagtggtggaagctcaaacctggcccaccaccgccgaaacctaaccaacaacaccgggacgacagtaggggtcttgtgcttcctgggtacaagtacctcggacccttcaacggactcgacaaaggagagccggtcaacgaggcagacgccgcggccctcgagcacgacaaagcctacgaccaccagctcaagcaaggggacaacccgtacctcaaatacaaccacgcggacgctgaatttcaggagcgtcttcaagaagatacgtctttcgggggcaacctcgggcgagcagtcttccaggccaaaaagagggtactcgagcctcttggtctggttgaggaagctgttaagacggctcctggaaaaaagagacctatagagcagtctcctgcagaaccggactcttcctcgggcatcggcaaatcaggccagcagcccgctaagaaaagactcaattttggtcagactggcgacacagagtcagtcccagaccctcaaccaatcggagaaccccccgcagccccctctggtgtgggatctaatacaatggcttcaggcggtggggcaccaatggcagacaataacgaaggcgccgacggagtgggtaattcctcgggaaattggcattgcgattccacatggatgggcgacagagttatcaccaccagcacaagaacctgggccctccccacctacaataatcacctctacaagcaaatctccagcgaatcgggagccaccaacgacaaccactacttcggctacagcaccccctgggggtattttgactttaacagattccactgtcacttctcaccacgtgactggcagcgactcatcaacaacaactggggatttagacccaagaaactcaatttcaagctcttcaacatccaagtcaaggaggtcacgcagaatgatggaaccacgaccatcgccaataaccttaccagcacggtgcaggtcttcacagactctgagtaccagctgccctacgtcctcggttcggctcaccagggctgccttccgccgttcccagcagacgtcttcatgattcctcagtacggctacttgactctgaacaatggcagccaagcggtaggacgttcttcattctactgtctagagtattttccctctcagatgctgaggacgggaaacaacttcaccttcagctacacttttgaagacgtgcctttccacagcagctacgcgcacagccagagtctggatcggctgatgaatcctctcattgaccagtacctgtattacctgagcaaaactcagggtacaagtggaacaacgcagcaatcgagactgcagttcagccaagctgggcctagctccatggctcagcaggccaaaaactggctaccgggacccagctaccgacagcagcgaatgtctaagacggctaatgacaacaacaacagtgaatttgcttggactgcagccaccaaatattacctgaatggaagaaattctctggtcaatcccgggcccccaatggccagtcacaaggacgatgaggaaaagtatttccccatgcacggaaatctcatctttggaaaacaaggcacaggaactaccaatgtggacattgaatcagtgcttattacagacgaagaagaaatcagaacaactaatcctgtggctacagaacaatacggacaggttgccaccaaccatcagagtcagaacaccacagcttcctatggaagtgtggacagccagggaatcttacctggaatggtgtggcaggaccgcgatgtctatcttcaaggtcccatttgggccaaaactcctcacacggacggacactttcatccttctccgctcatgggaggctttggactgaaacaccctcctccccagatcctgatcaaaaacacacctgtgccagcgaatcccgcgaccactttcactcctggaaagtttgcttcgttcattacccagtattccaccggacaggtcagcgtggaaatagagtgggagctgcagaaagaaaacagcaaacgctggaacccagaaattcagtacacctccaactacaacaagtcggtgaatgtggagtttaccgtggacgcaaacggtgtttattctgaaccccgccctattggcactcgttaccttacccggaacttg

SEQ ID NO: 129 - DNA, 3123 bp, Adeno-associated virus
gaattcgccctttctacggctgcgtcaactggaccaatgaaaactttcccttcaacgattgcgtcgacaagatggtgatctggtgggaggagggaaagatgaccgccaaggtcgtggaatctgccaaagccattctgggtggaggcaaggttcgtgtggaccagaaatgcaagtcttcggcccagatcgacccgactccggtgattgtcacctctaacaccaacatgtgcgccgtgattgacggaaactcgaccaccttcgagcaccagcagccgttgcaagaccggatgttcaaatttgaacttacccgccgtttggatcatgactttgggaaggtcaccaagcaggaagtcaaagactttttccggtgggctcaagatcacgtgactgaggtggagcatgagttctacgtcaaaaagggtggagccaagaaaaggcccgcccccgatgatgtatatataaatgagcccaagcgggcgcgcgagtcagttgcgcagccatcgacgtcagacgcggaagcttcgataaactacgcggacaggtaccaaaacaaatgttctcgtcacgtgggcatgaatctgatgctgtttccctgtcgacaatgcgaaagaatgaatcagaattcaaatatctgcttcacacacgggcaaaaagactgtttggaatgctttcccgtgtcagaatctcaacccgtttctgtcgtcagaaaaacgtatcagaaactttgttacattcatcatatcatgggaaaagtaccagacgcctgcactgcctgcgacctggtaaatgtggacttggatgactgtatttctgagcaataaatgacttaaatcaggtatggctgctgacggttatcttccagattggctcgaggacactctctctgaaggaatcagacagtggtggaagctcaaacctggcccaccaccgccgaaacctaaccaacaacaccgggacgacagtaggggtcttgtgcttcctgggtacaagtacctcggacccttcaacggactcgacaaaggagagccggtcaacgaggcagacgccgcggccctcgagcacgacaaagcctacgaccaccagctcaagcaaggggacaacccgtacctcaaatacaaccacgcggacgctgaatttcaggagcgtcttcaagaagatacgtctttcgggggcaacctcgggcgagcagtcttccaggccaaaaagagggtactcgagcctcttggtctggttgaggaagctgttaagacggctcctggaaaaaagagacctatagagcagtctcctgcagaaccggactcttcctcgggcatcggcaaatcaggccagcagcccgctaagaaaagactcaattttggtcagactggcgacacagagtcagtcccaggccctcaaccaatcggagaaccccccgcagccccctctggtgtgggatctaatacaatggcttcaggcggtggggcaccaatggcagacaataacgaaggcgccgacggagtgggtaattcctcgggaaattggcattgcgattccacatggatgggcgacagagttatcaccaccagcacaagaacctgggccctccccacctacaataatcacctctacaagcaaatctccagcgaatcgggagccaccaacgacaaccactacttcggctacagcaccccctgggggtattttgactttaacagattccactgtcacttctcaccacgtgactggcagcgactcatcaacaacaactggggatttagacccaagaaactcaatttcaagctcttcaacatccaagtcaaggaggtcacgcagaatgatggaaccacgaccatcgccaataaccttaccagcgcggtgcaggtcttcacagactctgagtaccagctgccctacgtcctcggttcggctcaccagggctgccttccgccgttcccagcagacgtcttcatgattcctcagtacggctacttgactctgaacaatggcagccaagcggtaggacgttcttcattctactgtctagagtattttccctctcagatgctgaggacgggaaacaacttcaccttcagctacacttttgaagacgtgcctttccacagcagctacgcgcacagccagagtctggatcggctgatgaatcctctcattgaccagtacctgtattacctgagcaaaactcagggtacaagtggaacaacgcagcaatcgagactgcagttcagccaagctgggcctagctccatggctcagcaggccaaaaactggctaccgggacccagctaccgacagcagcgaatgtctaagacggctaatgacaacaacaacagtgaatttgcttggactgcagccaccaaatattacctgaatggaagaaattctctggtcaatcccgggcccccagtggccagtcacaaggacgatgaggaaaagtatttccccatgcacggaaatctcatctttggaaaacaaggcacaggaactaccaatgtggacattgaatcagtgcttattacagacgaagaagaaatcagaacaactaatcctgtggctacagaacaatacggacaggttgccaccaaccatcagagtcagaacaccacagcttcctatggaagtgtggacagccagggaatcttacctggaatggtgtggcaggaccgcgatgtctatcttcaaggtcccatttgggccaaaactcctcacacggacggacactttcatccttctccgctcatgggaggctttggactgaaacaccctcctccccagatcctgatcaaaaacacacctgtgccagcgaatcccgcgaccactttcactcctggaaagtttgcttcgttcattacccagtattccacctgacaggtcagcgtggaaatagagtgggagctgcagaaagaaaacagcaaacgctggaacccagaaattcagtacacctccaactacaacaagtcggtgaatgtggagtttaccgtggacgcaaacggtgtttattctgaaccccgccctattggcactcgttaccttacccggaacttgtaatttcctgttaatgaataagccgatttatgcgtttcagttgaactttggtctctgcgaagggcgaattcgtttaaacct

SEQ ID NO: 130 - protein, 735 aa, Adeno-associated virus
MAADGYLPDWLEDTLSEGIRQWWKLKPGPPPPKPNQQHRDDSRGLVLPGYKYLGPFNGLDKGEPVNEADAAALEHDKAYDHQLKQGDNPYLKYNHADAEFQERLQEDTSFGGNLGRAVFQAKKRVLEPLGLVEEAVKTAPGKKRPIEQSPAEPDSSSGIGKSGQQPAKKRLNFGQTGDTESVPGPQPIGEPPAAPSGVGSNTMASGGGAPMADNNEGADGVGNSSGNWHCDSTWMGDRVITTSTRTWALPTYNNHLYKQISSESGATNDNHYFGYSTPWGYFDFNRFHCHFSPRDWQRLINNNWGFRPKKLNFKLFNIQVKEVTQNDGTTTIANNLTSAVQVFTDSEYQLPYVLGSAHQGCLPPFPADVFMIPQYGYLTLNNGSQAVGRSSFYCLEYFPSQMLRTGNNFTFSYTFEDVPFHSSYAHSQSLDRLMNPLIDQYLYYLSKTQGTSGTTQQSRLQFSQAGPSSMAQQAKNWLPGPSYRQQRMSKTANDNNNSEFAWTAATKYYLNGRNSLVNPGPPVASHKDDEEKYFPMHGNLIFGKQGTGTTNVDIESVLITDEEEIRTTNPVATEQYGQVATNHQSQNTTASYGSVDSQGILPGMVWQDRDVYLQGPIWAKTPHTDGHFHPSPLMGGFGLKHPPPQILIKNTPVPANPATTFTPGKFASFITQYSTGQVSVEIEWELQKENSKRWNPEIQYTSNYNKSVNVEFTVDANGVYSEPRPIGTRYLTRNL

SEQ ID NO: 131 - DNA, 3123 bp, Adeno-associated virus
gaattcgccctttctacggctgcgtcaactggaccaatgaaaactttcccttcaacgattgcgtcgacaagatggtgatctggtgggaggagggaaagatgaccgccaaggtcgtggaatctgccaaagccattctgggtggaagcaaggttcgtgtggaccagaaatgcaagtcttcggcccagatcgacccgactccggtgattgtcacctctaacaccaacatgtgcgccgtgattgacggaaactcgaccaccttcgagcaccagcagccgttgcaagaccggatgttcaaatttgaacttacccgccgtttggatcatgactttgggaaggtcaccaagcaggaagtcaaagactttttccggtgggctcaagatcacgtgactgaggtggagcatgagttctacgtcaaaaagggtggagccaagaaaaggcccgcccccgatgatgtatatataaatgagcccaagcgggcgcgcgagtcagttgcgcagccatcgacgtcagacgcggaagcttcgataaactacgcgggcaggtaccaaaacaaatgttctcgtcacgtgggcatgaatctgatgctgtttccctgtcgacaatgcgaaagaatgaatcagaattcaaatatctgcttcacacacgggcaaaaagactgtttggaatgctttcccgtgtcagaatctcaacccgtttctgtcgtcagaaaaacgtatcagaaactttgttacattcatcatatcatgggaaaagaaccagacgcctgcactgcctgcgacctggtaaatgtggacttggatgactgtatttctgagcaataaatgacttaaatcaggtatggctgctgacggttatcttccagattggctcgaggacactctctctgaaggaatcagacagtggtggaagctcaaacctggcccaccaccgccgaaacctaaccaacaacaccgggacgacagtaggggtcttgtgcttcctgggtacaagtacctcggacccttcaacggactcgacaaaggagagccggtcaacgaggcagacgccgcggccctcgagcacgacaaagcctacgaccaccagctcaagcaaggggacaacccgtacctcaaatacaaccacgcggacgctgaatttcaggagcgtcttcaagaagatacgtctttcgggggcaacctcgggcgagcagtcttccaggccaaaaagagggtactcgagcctcttggtctggttgaggaagctgttaagacggctcctggaaaaaagagacctatagagcagtctcctgcagaaccggactcttcctcgggcatcggcgaatcaggccagcagcccgctaagaaaagactcaattttggtcagactggcgacacagagtcagtcccagaccctcaaccaatcggagaaccccccgcagccccctctggtgtgggatctaatacaatggcttcaggcggtggggcaccaatggcagacgataacgaaggcgccgacggagtgggtaattcctcgggaaattggcattgcgattccacatggatgggcgacagagttatcaccaccagcacaagaacctgggccctccccacctacaataatcacctctacaagcaaatctccagcgaatcgggagccaccaacgacaaccactacttcggctacagcaccccctgggggtattttgactttaacagattccactgtcacttctcaccacgtgactggcagcgactcatcaacaacaactggggatttagacccaagaaactcaatttcaagctcttcaacatccaagtcaaggaggtcacgcagaatgatggaaccacgaccatcgccaataaccttaccagcacggtgcaggtcttcacagactctgagtaccagctgccctacgtcctcggttcggctcaccagggctgccttccgccgttcccagcagacgtcttcatgattcctcagtacggctacttgactctgaacaatggcagccaagcggtaggacgttcttcattctactgtctagagtattttccctctcagatgctgaggacgggaaacaacttcaccttcagctacacttttgaagacgtgcctttccacagcagctacgcgcacagccagagtctggatcggctgatgaatcctctcattgaccagtacctgtattacctgagcaaaactcagggtacaagtggaacaacgcagcaatcgagactgcagttcagccaagctgggcctagctccatggctcagcaggccaaaaactggctaccgggacccagctaccgacagcagcgaatgtctaagacggctaatgacaacaacaacagtgaatttgcttggactgcagccaccaaatattacctgaatggaagaaattctctggtcaatcccgggcccccaatggccagtcacaaggacgatgaggaaaagtatttccccatgcacggaaatctcatctttggaaaacaaggcacaggaactaccaatgtggacattgaatcagtgcttattacagacgaagaagaaatcagaacaactaatcctgtggctacagaacaatacggacaggttgccaccaaccatcagagtcaggacaccacagcttcctatggaagtgtggacagccagggaatcttacctggaatggtgtggcaggaccgcgatgtctatcttcaaggtcccatttgggccaaaactcctcacacggacggacactttcatccttctccgctcatgggaggctttggactgaaacaccctcctccccagatcctgatcaaaaacacacctgtgccagcgaatcccgcgaccactttcactcctggaaagtttgcttcgttcattacccagtattccaccggacaggtcagcgtggaaatagagtgggagctgcagaaagaaaacagcaaacgctggaacccagaaattcagtacacctccaactacaacaagtcggtgaatgtggagtttaccgtggacgcaaacggtgtttattctgaaccccgccctattggcactcgttaccttacccggaacttgtaatttcctgttaatgaataaaccgatttatgcgtttcagttgaactttggtctctgcgaagggcgaattcgcggccgcta

SEQ ID NO: 132 - protein, 735 aa, Adeno-associated virus
MAADGYLPDWLEDTLSEGIRQWWKLKPGPPPPKPNQQHRDDSRGLVLPGYKYLGPFNGLDKGEPVNEADAAALEHDKAYDHQLKQGDNPYLKYNHADAEFQERLQEDTSFGGNLGRAVFQAKKRVLEPLGLVEEAVKTAPGKKRPIEQSPAEPDSSSGIGESGQQPAKKRLNFGQTGDTESVPDPQPIGEPPAAPSGVGSNTMASGGGAPMADDNEGADGVGNSSGNWHCDSTWMGDRVITTSTRTWALPTYNNHLYKQISSESGATNDNHYFGYSTPWGYFDFNRFHCHFSPRDWQRLINNNWGFRPKKLNFKLFNIQVKEVTQNDGTTTIANNLTSTVQVFTDSEYQLPYVLGSAHQGCLPPFPADVFMIPQYGYLTLNNGSQAVGRSSFYCLEYFPSQMLRTGNNFTFSYTFEDVPFHSSYAHSQSLDRLMNPLIDQYLYYLSKTQGTSGTTQQSRLQFSQAGPSSMAQQAKNWLPGPSYRQQRMSKTANDNNNSEFAWTAATKYYLNGRNSLVNPGPPMASHKDDEEKYFPMHGNLIFGKQGTGTTNVDIESVLITDEEEIRTTNPVATEQYGQVATNHQSQDTTASYGSVDSQGILPGMVWQDRDVYLQGPIWAKTPHTDGHFHPSPLMGGFGLKHPPPQILIKNTPVPANPATTFTPGKFASFITQYSTGQVSVEIEWELQKENSKRWNPEIQYTSNYNKSVNVEFTVDANGVYSEPRPIGTRYLTRNL

SEQ ID NO: 133 - DNA, 3113 bp, Adeno-associated virus
gaattcgccctttctacggctgcgtcaactggaccaatgaaaactttcccttcaacgattgcgtcgacaagatggtgatctggtgggaggagggaaagatgaccgccaaggtcgtggaatctgccaaagccattctgggtggaagcaaggttcgtgtggaccagaaatgcaagtcttcggcccagatcgacccgactccggtgattgtcacctctaacaccaacatgtgcgccgtgattgacggaaactcgaccaccttcgagcaccagcagccgttgcaagaccggatgttcaaatttgaacttacccgccgtttggatcatgactttgggaaggtcaccaagcaggaagtcaaagactttttccggtgggctcaagatcacgtgactgaggtggagcatgagttctacgtcaaaaagggtggagccaagaaaaggcccgcccccgatgatgtatatataaatgagcccaagcgggcgcgcgagtcagttgcgcagccatcgacgtcagacgcggaagcttcgataaactacgcggacaggtaccaaaacaaatgttctcgtcacgtgggcatgaatctgatgctgtttccctgtcgacaatgcgaaagaatgaatcagaattcaaatatctgcttcacacacgggcaaaaagactgtttggaatgctttcccgtgtcagaatctcaacccgttcctgtcgtcagaaaaacgtatcagaaactttgttacattcatcatatcatgggaaaagtaccagacgcctgcactgcctgcgacctggtaaatgtggacttggatgactgtatttctgagcaataaatgacttaaatcaggtatggctgctgacggttatcttccagattggctcgaggacactctctctgaaggaatcagacagtggtggaagctcaaacctggcccaccaccgccgaaacctaaccaacaacaccgggacgacagtaggggtcttgtgcttcctgggtacaagtacctcggacccttcaacggactcgacaaaggagagccggtcaacgaggcagacgccgcggccctcgagcacgacaaagcctacgaccaccagctcaagcaaggggacaacccgtacctcaaatacaaccacgcggacgctgaatttcaggagcgtcttcaagaagatacgtctttcgggggcaacctcgggcgagcagtcttccaggccaaaaagagggtactcgagcctcttggtctggttgaggaagctgttaagacggctcctggaaaaaagagacctatagagcagtctcctgcagaaccggactcttcctcgggcatcggcaaatcaggccagcagcccgctaagaaaagactcaattttggtcagactggcgacacagagtcagtcccagaccctcaaccaatcggagaaccccccgcagccccctctggtgtgggatctaatacaatggcttcaggcggtggggcaccaatggcagacaataacgaaggcgccgacggagtgggtaattcctcgggaaattggcattgcgattccacatggatgggcgacagagttatcaccaccagcacaagaacctgggccctccccacctacaataatcacctctacaagcaaatctccagcgaatcgggagccaccaacgacaaccactacttcggctacagcaccccctgggggtattttgactttaacagattccactgtcacttctcaccacgtgactggcagcgactcatcaataacaactggggatttagacccaagaaactcaatttcaagctcttcaacatccaagtcaaggaggtcacgcagaatgatggaaccacgaccatcgccaataaccttaccagcacggtgcaggtcttcacagactctgagtaccagctgccctacgtcctcggttcggctcaccagggctgccttccgccgttcccagcagacgtcttcatgattcctcagtacggctacttgactctgaacaatggcagccaagcggtaggacgttcttcattctactgtctagagtattttccctctcagatgctgaggacgggaaacaacttcaccttcagctacacttttgaagacgtgcctttccacagcagctacgcgcacagccagagtctggatcggctgatgaatcctctcattgaccagtacctgtattacctgagcaaaactcagggtacaagtggaacaacgcagcaatcgagactgcagttcaaccaagctgggcctagctccatggctcagcaggccaaaaactggctaccgggacccagctaccgacagcagcgaatgtctaagacggctaatgacaacaacaacagtgaatttgcttggactgcagccaccaaatattacccgaatggaagaaattctctggtcaatcccgggcccccaatggccagtcacaaggacgatgaggaaaagtatttccccatgcacggaaatctcatctttggaaaacaaggcacaggaactaccaatgtggacattgaatcagtgcttattacagacgaagaagaaatcagaacgactaatcctgtggctacagaacaatacggacaggttgccaccaaccgtcagagtcagaacaccacagcttcctatggaagtgtggacagccagggaatcttacctggaatggtgtggcaggaccgcgatgtctatcttcaaggtcccatttgggccaaaactcctcacacggacggacactttcatccttctccgctcatgggaggctttggactgaaacaccctcctccccagatcctgatcaaaaacacacctgtgccagcgaatcccgcgaccactttcactcctggaaagtttgcttcgttcattacccagtattccaccggacaggtcagcgtggaaatagagtgggagctgcagaaagaaaacagcaaacgctggaacccggaaattcagtacacctccaactacaacaagtcggtgaatgtggagtttaccgtggacgcaaacggtgtttattctgaaccccgccctattggcactcgttaccttacccggaacttgtaatttcctgttaatgaataaaccgatttatgcgtttcagttgaactttggtctctgcgaagggcgaattc

SEQ ID NO: 134 - protein, 735 aa, Adeno-associated virus
MAADGYLPDWLEDTLSEGIRQWWKLKPGPPPPKPNQQHRDDSRGLVLPGYKYLGPFNGLDKGEPVNEADAAALEHDKAYDHQLKQGDNPYLKYNHADAEFQERLQEDTSFGGNLGRAVFQAKKRVLEPLGLVEEAVKTAPGKKRPIEQSPAEPDSSSGIGKSGQQPAKKRLNFGQTGDTESVPDPQPIGEPPAAPSGVGSNTMASGGGAPMADNNEGADGVGNSSGNWHCDSTWMGDRVITTSTRTWALPTYNNHLYKQISSESGATNDNHYFGYSTPWGYFDFNRFHCHFSPRDWQRLINNNWGFRPKKLNFKLFNIQVKEVTQNDGTTTIANNLTSTVQVFTDSEYQLPYVLGSAHQGCLPPFPADVFMIPQYGYLTLNNGSQAVGRSSFYCLEYFPSQMLRTGNNFTFSYTFEDVPFHSSYAHSQSLDRLMNPLIDQYLYYLSKTQGTSGTTQQSRLQFNQAGPSSMAQQAKNWLPGPSYRQQRMSKTANDNNNSEFAWTAATKYYPNGRNSLVNPGPPMASHKDDEEKYFPMHGNLIFGKQGTGTTNVDIESVLITDEEEIRTTNPVATEQYGQVATNRQSQNTTASYGSVDSQGILPGMVWQDRDVYLQGPIWAKTPHTDGHFHPSPLMGGFGLKHPPPQILIKNTPVPANPATTFTPGKFASFITQYSTGQVSVEIEWELQKENSKRWNPEIQYTSNYNKSVNVEFTVDANGVYSEPRPIGTRYLTRNL

SEQ ID NO: 135 - DNA, 3122 bp, Adeno-associated virus
agcggccgcgaattcgccctttctacggctgcgtcaactggaccaatgaaaactttcccttcaacgattgcgtcgacaagatggtgatctggtgggaggagggaaagatgaccgccaaggtcgtggaatctgccaaagccattctgggtggaagcaaggttcgtgtggaccagaaatgcaggtcttcggcccagatcgacccgactccggtgattgtcacctctaacaccaacatgtgcgccgtgattgacggaaactcgaccaccttcgagcaccagcagccgttgcaagaccggatgttcaaatttgaacttacccgccgtttggatcatgactttgggaaggtcaccaagcaggaagtcaaagactttttccggtgggctcaagatcacgtgactgaggtggagcatgagttctacgtcaaaaagggtggagccaagaaaaggcccgcccccgatgatgtatatataaatgagcccaagcgggcgcgcgagtcagttgcgcagccatcgacgtcagacgcggaagcttcgataaactacgcggacaggtaccaaaacaaatgttctcgtcacgtgggcatgaatctgatgctgtttccctgtcgacaatgcgaaagaatgaatcagaattcaaatatctgcttcacacacgggcaaaaagactgtttggaatgctttcccgtgtcagaatctcaacccgtttctgtcgtcagaaaaacgtatcagaaactttgttacattcatcatatcatgggaaaagtaccagacgcctgcactgcctgcgacctggtaaatgtggacttggatgactgtatttctgagcaataaatgacttaaatcaggtatggctgctgacggttatcttccagattggctcgaggacactctctctgaaggaatcagacagtggtggaagctcaaacctggcccaccaccgccgaaacctaaccaacaacaccgggacgacagtaggggtcttgtgcttcctgggtacaagtacctcggacccttcaacggactcgacaaaggagagccggtcaacgaggcagacgccgcggccctcgagcacgacaaagcctacgaccaccagctcaagcaaggggacaacccgtacctcaaatacaaccacgcggacgctgaatttcaggagcgtcttcaagaagatacgtctttcgggggcaacctcgggcgagcagtcttccaggccaaaaagagggtactcgagcctcttggtctggttgaggaagctgttaagacggctcctggaaaaaagagacctatagagcagtctcctgcagaaccggactcttcctcgggcatcggcaaatcaggccagcagcccgctaagaaaagactcaattttggtcagactggcgacacagagtcagtcccagaccctcaaccaatcggagaaccccccgcagccccctctggtgtgggatctaatacaatggcttcaggcggtggggcaccaatggcagacaataacgaaggcgccgacggagtgggtaattcctcgggaaattggcattgcgattccacatggatgggcgacagagttatcaccaccagcacaagaacctgggccctccccacctacaataatcgcctctacaagcaaatctccagcgaatcgggagccaccaacgacaaccactacttcggctacagcaccccctgggggtattttgactttaacagattccactgtcacttctcaccacgtgactggcagcgactcatcaacaacaactggggatttagacccaagaaactcaatttcaagctcttcaacatccaagtcaaggaggtcacgcagaatgatggaaccacgaccatcgccaataaccttaccagcacggtgcaggtcttcacagactctgagtaccagctgccctacgtcctcggttcggctcaccagggctgccttccgccgttcccagcagacgtcttcatgattcctcagtacggctacttgactctgaacaatggcagccaagcggtaggacgttcttcattctactgtctagagtattttccctctcagatgctgaggacgggaaacaacttcaccttcagctacacttttgaagacgtgcctttccacagcagctacgcgcacagccagagtctggatcggctgatgaatcctctcattgaccagtacctgtattacctgagcaaaactcagggtacaagtggaacaacgcagcaatcgagactgcagttcagccaagctgggcctagctccatggctcagcaggccaaaaactggctaccgggacccagctaccgacagcagcgaatgtctaagacggctaatgacaacaacaacagtgaatttgcttggactgcagccaccaaatattacctgaatggaagaaattctctggtcaatcccgggcccccaatggccagtcacaaggacgatgaggaaaagtatttccccatgcacggaaatctcatctttggaaaacaaggcacaggaactaccaatgtggacattgaatcagtgcttattacagacgaagaagaaatcagaacaactaatcctgtggctacagaacaatacggacaggttgccaccaaccatcagagtcagaacaccacagcttcctatggaagtgtggacagccagggaatcttacctggaatggtgtggcaggaccgcgatgtctatcttcaaggtcccatttgggccaaaactcctcacacggacggacactttcatccttctccgctcatgggaggctttggactgaaacaccctcctccccagatcctgatcaaaaacacacctgtgccagcgaatcccgcgaccactttcactcctggaaagtttgcttcgttcattacccagtattccaccggacaggtcagcgtggaaatagagtgggagctgcagaaagaaaacagcaaacgctggaacccagaaattcagtacacctccaactacaacaagtcggtgaatgtggagtttaccgtggacgcaaacggtgtttattctgaaccccgccctattggcactcgttaccttacccggaacttgtaatttcctgttaatgaataaaccgatttatgcgtttcagttgaactttggtctctgcgaagggcgaattc

SEQ ID NO: 136 - protein, 735 aa, Adeno-associated virus
MAADGYLPDWLEDTLSEGIRQWWKLKPGPPPPKPNQQHRDDSRGLVLPGYKYLGPFNGLDKGEPVNEADAAALEHDKAYDHQLKQGDNPYLKYNHADAEFQERLQEDTSFGGNLGRAVFQAKKRVLEPLGLVEEAVKTAPGKKRPIEQSPAEPDSSSGIGKSGQQPAKKRLNFGQTGDTESVPDPQPIGEPPAAPSGVGSNTMASGGGAPMADNNEGADGVGNSSGNWHCDSTWMGDRVITTSTRTWALPTYNNRLYKQISSESGATNDNHYFGYSTPWGYFDFNRFHCHFSPRDWQRLINNNWGFRPKKLNFKLFNIQVKEVTQNDGTTTIANNLTSTVQVFTDSEYQLPYVLGSAHQGCLPPFPADVFMIPQYGYLTLNNGSQAVGRSSFYCLEYFPSQMLRTGNNFTFSYTFEDVPFHSSYAHSQSLDRLMNPLIDQYLYYLSKTQGTSGTTQQSRLQFSQAGPSSMAQQAKNWLPGPSYRQQRMSKTANDNNNSEFAWTAATKYYLNGRNSLVNPGPPMASHKDDEEKYFPMHGNLIFGKQGTGTTNVDIESVLITDEEEIRTTNPVATEQYGQVATNHQSQNTTASYGSVDSQGILPGMVWQDRDVYLQGPIWAKTPHTDGHFHPSPLMGGFGLKHPPPQILIKNTPVPANPATTFTPGKFASFITQYSTGQVSVEIEWELQKENSKRWNPEIQYTSNYNKSVNVEFTVDANGVYSEPRPIGTRYLTRNL

SEQ ID NO: 137 - DNA, 3121 bp, Adeno-associated virus
gaattcgcccttcgcagagaccaaagttcaactgaaacgaatcaaccggtttattgattaacaagcaattacagattacgggtgaggtaacgggtgccgatggggcgaggctcagaataagtgccatctgtgttaacagcaaagtccacatttgtagatttgtagtagttggaagtgtattgaatctctgggttccagcgtttgctgttttctttctgcagctcccattcaatttccacgctgacctgtccggtgctgtactgcgtgatgaacgacgccagcttagcttgactgaaggtagttggaggatccgcgggaacaggtgtattcttaatcaggatctgaggaggcgggtgtttcagtccaaagccccccatcagcggcgagggatgaaagtttccgtccgtgtgaggaatcttggcccagataggaccctgcaggtacacgtcccggttctgccagaccatgccaggtaaggctccttgactgttgacggcccctacaataggagcggcgttttgctgttgcaggttatcggccaccacgccgtactgttctgtggccactgggttggtggttttaatttcttcctcactggttagcataacgctgctatagtccacgttgccttttccagctccctgtttcccaaacattaagactccgctggacggaaaaaatcgctcttcgtcgtccttgtgggttgccatagcgacaccgggatttaccagagagtctctgccattcagatgatacttggtggcaccggtccaggcaaagttgctgttgttattttgcgacagtgtcgtggagacgcgttgctgccggtagcagggcccgggtagccagtttttggcctgagccgacatgttattaggcccggcctgagaaaatagcaactgctgagttcctgcggtacctcccgtggactgagtccgagacaggtagtacaggtactggtcgatgagggggttcatcagccggtccaggctttggctgtgcgcgtagctgctgtgaaaaggcacgtcctcaaactggtagctgaactcaaagttgttgcccgttctcagcatttgagaaggaaagtactccaggcagtagaaggaggaacggcccacggcctgactgccattgttcagagtcaggtacccgtactgaggaatcatgaagacgtccgccgggaacggaggcaggcagccctggcgcgcagagccgaggacgtacgggagctggtattccgagtccgtaaagacctgaatcgtgctggtaaggttattggcgatggtcttggtgccttcattctgcgtgacctccttgacctggatgttgaagagcttgaagttgagtctcttgggccggaatccccagttgttgttgatgagtcgctgccagtcacgtggtgagaagtggcagtggaatctgttaaagtcaaaatacccccagggggtgctgtagccgaagtaggtgttgtcgttggtgcttcctcccgaagtcccgttggagatttgcttgtagaggtggttgttgtaggtggggagggcccaggttcgggtgctggtggtgatgactctgtcgcccagccatgtggaatcgcaatgccaatttcctgaggaactacccactccgtcggcgccttcgttattgtctgccattggagcgccaccgcctgcagccattgtaccagatcccagaccagaggggcctgcggggggttctccgattggttgagggtcgggcactgactctgagtcgccagtctgcccaaagttgagtctctttttcgcgggctgctggcctttcttgccgatgcccgtagtggagtctggagaacgctggggtgatggctctaccggtctcttctttccaggagccgtcttagcgccttcctcaaccagaccgagaggttcgagaacccgcttcttggcctggaagactgctcgtccgaggttgcccccaaaagacgtatcttcttgcagacgctcctgaaactcggcgtcggcgtggttataccgcaggtacggattgtcacccgctttgagctgctggtcgtaggccttgtcgtgctcgagggccgctgcgtccgccgcgttgacgggctcccccttgtcgagtccgttgaagggtccgaggtacttgtagccaggaagcaccagaccccggccgtcgtcctgcttttgctggttggctttgggcttcggggctccaggtttcagcgcccaccactcgcgaatgccctcagagaggttgtcctcgagccaatctggaagataaccatcggcagccatacctgatctaaatcatttattgttcaaagatgcagtcatccaaatccacattgaccagatcgcaggcagtgcaagcgtctggcacctttcccatgatatgatgaatgtagcacagtttctgatacgcctttttgacgacagaaacgggttgagattctgacacgggaaagcactctaaacagtctttctgtccgtgagtgaagcagatatttgaattctgattcattctctcgcattgtctgcagggaaacagcatcagattcatgcccacgtgacgagaacatttgttttggtacctgtccgcgtagttgatcgaagcttccgcgtctgacgtcgatggctgcgcaactgactcgcgcacccgtttgggctcacttatatctgcgtcactgggggcgggtcttttcttggctccaccctttttgacgtagaattcatgctccacctcaaccacgtgatcctttgcccaccggaaaaagtctttgacttcctgcttggtgaccttcccaaagtcatgatccagacggcgggtgagttcaaatttgaacatccggtcttgcaacggctgctggtgttcgaaggtcgttgagttcccgtcaatcacggcgcacatgttggtgttggaggtgacgatcacgggagtcgggtctatctgggccgaggacttgcatttctggtccacgcgcaccttgcttcctccgagaatggctttggccgactccacgaccttggcggtcatcttcccctcctcccaccagatcaccatcttgtcgacacagtcgttgaagggaaagttctcattggtccagttgacgcagccgtagaagggcgaattc

SEQ ID NO: 138 - protein, 733 aa, Adeno-associated virus
MAADGYLPDWLEDNLSEGIREWWDLKPGAPKLKANQQKQDDGRGLVLPGYKYLGPFHGLDKGEPVNAADAAALEHDKAYDQQLKAGDNPYLRYNHADAEFQERLQEDTSFGGNLGRAVFQAKKRVLEPLGLVEEGAKTAPGKKRPLESPQEPDSSSGIGKKGKQPAKKRLNFEEDTGAGDGPPEGSDTSAMSSDIEMRAAPGGNAVDAGQGSDGVGNASGDWHCDSTWSEGKVTTTSTRTWVLPTYNNHLYLRLGTTSNSNTYNGFSTPWGYFDFNRFHCHFSPRDWQRLINNNWGLRPKAMRVKIFNIQVKEVTTSNGETTVANNLTSTVQIFADSSYELPYVMDAGQEGSLPPFPNDVFMVPQYGYCGIVTGENQNQTDRNAFYCLEYFPSQMLRTGNNFEMAYNFEKVPFHSMYAHSQSLDRLMNPLLDQYLWHLQSTTSGETLNQGNAATTFGKIRSGDFAFYRKNWLPGPCVKQQRFSKTASQNYKIPASGGNALLKYDTHYTLNNRWSNIAPGPPMATAGPSDGDFSNAQLIFPGPSVTGNTTTSANNLLFTSEGEIAATNPRDTDMFGQIADNNQNATTAPITGNVTAMGVLPGMVWQNRDIYYQGPIWAKIPHADGHFHPSPLIGGFGLKHPPPQIFIKNTPVPANPATTFTAARVDSFITQYSTGQVAVQIEWEIEKERSKRRNPEVQFTSNYGNQSSMLWAPDTTGKYTEPRVIGSRYLTNHL

SEQ ID NO: 139 - protein, 735 aa, Adeno-associated virus
MAADGYLPDWLEDTLSEGIRQWWKLKPGPPPPKPNQQHRDDSRGLVLPGYKYLGPFNGLDKGEPVNEADAAALEHDKAYDHQLKQGDNPYLKYNHADAEFQERLQEDTSFGGNLGRAVFQAKKRVLEPLGLVEEAVKTAPGKKRPIEQSPAEPDSSSGIGKSGQQPAKKRLNFGQTGDTESVPDPQPIGEPPAAPSGVGSNTMASGGGAPMADNNEGADGVGNSSGNWHCDSTWMGDRVITTSTRTWALPTYNNHLYKQISSESGATNDNHYFGYSTPWGYFDFNRFHCHFSPRDWQRLINNNWGFRPKKLNFKLFNIQVKEVTQNDGTTTIANNLTSTVQVFTDSEYQLPYVLGSAHQGCLPPFPADVFMIPQYGYLTLNNGSQAVGRSSFYCLEYFPSQMLRTGNNFTFSYTFEDVPFHSSYAHSQSLDRLMNPLIDQYLYYLSKTQGTSGTTQQSRLQFSQAGPSSMAQQAKNWLPGPSYRQQRMSKTANDNNNSEFAWTAATKYYLNGRNSLVNPGPPMASHKDDEEKYFPMHGNLIFGKQGTGTTNVDIESVLITDEEEIRTTNPVATEQYGQVATNHQSQNTTASYGSVDSQGILPGMVWQDRDVYLQGPIWAKIPHTDGHFHPSPLMGGFGLKHPPPQILIKNTPVPANPATTFTPGKFASFITQYSTGQVSVEIEWELQKENSKRWNPEIQYTSNYNKSVNVEFTVDANGVYSEPRPIGTRYLTRNL

SEQ ID NO: 140 - DNA, 3127 bp, Adeno-associated virus
gcggccgcgaattcgcccttcgcagagaccaaagttcaactgaaacgaatcaaccggtttattgattaacatgcaattacagattacgggtgaggtaacgagtgccaatagggcgaggctcagagtaaacaccctggctgtcaacggcaaagtccacaccagtctgcttttcaaagttggaggtgtactgaatctccgggtcccagcgcttgctgttttccttctgcagctcccactcgatttccacgctgacttgtccggtgctgtactgtgtgatgaacgaagcaaacttggcaggagtaaacacctccggaggattagcgggaacgggagtgttcttgatcaggatctgaggaggcggatgtttaagtccaaagccgcccatcaaaggagacgggtgaaagttgccatccgtgtgaggaatcttggcccagatgggaccctgcaggtacacgtcccggttctgccagaccatgccaggtaaggctccctggttgttgacaacttgtgtctgggctgcagtattagccgcttgtaagttgctgctgactatcccgtattcttccgtggctacaggattagtaggacgaatttcttcttcatttgtcattaacacattttccaatgtagttttgttagttgctccagtttttccaaaaatcaggactccgctggatgggaaaaagcggtcctcgtcgtccttgtgagttgccatggcgacgccgggattaaccaacgagtttctgccgttcaggtgatatttggtggcaccagtccaagcaaagttgctgttgttgttttgatccagcgttttggagaccctttgttgccggaagcagggtccaggtaaccaattcttggcttgttcggccatagttgaaggcccgccctggtaaaactgcagttcccgattgccagctgtgcctcctgggtcactctgtgttctggccaggtagtacaagtactggtcgatgaggggattcatcagccggtccaggctctggctgtgtgcgtagctgctgtggaaaggcacgtcctcgaagctgtagctgaactcaaagttgttgcccgttctcagcatctgagaggggaagtactccaggcagtagaaggaggaacgtcccacagactgactgccattgttgagagtcaggtagccgtactgaggaatcatgaagacgtccgccgggaacggaggcaggcagccctggtgcgcagagccgaggacgtacggcagctggtattccgagtccgagaatacctgaatcgtgctggtaaggttattagcgatggtcgtaacgccgtcattcgtcgtgacctccttgacctggatgttgaagagcttgaaccgcagcttcttgggccggaatccccagttgttgttgatgagtcgctgccagtcacgtggtgagaagtggcagtggaatctgttaaagtcaaaatacccccagggggtgctgtagccgaagtaggtgttgtcgttggtactacctgcagtttcactggagatttgctcgtagaggtggttgttgtaggtgggcagggcccaggttcgggtgctggtggtaatgactctgtcgcccagccatgtggaatcgcaatgccaatttcctgaggcattacccactccgtcggcaccttcgttattgtctgccattggtgcgccaccgcctgcagccactgtaccagatcccacactagagggcgctgctggaggttctccgagaggttgagggtcggggactgactctgagtcgccagtctgaccgaaattgagtctctttctggcgggctgctggcccttcttgccgatgcccgtggaggagtcgggggaacgctgaggtgacggctctaccggtctcttctttgcaggagccgtcttagcgccttcctcaaccagaccgagaggttcgagaacccgcttcttggcctggaagactgctcgcccgaggttgcccccaaatgacgtatcttcttgcagacgctcctgaaactcggcgtcggcgtggttataccgcaggtacgggttgtcacccgcattgagctgctggtcgtaggccttgtcgtgctcgagggccgctgcgtccgccgcgttgacgggctcccccttgtcgagtccgttgaagggtccgaggtacttgtagccaggaagcaccagaccccggccgttgtcctgcttttgctggttggctttgggtttcggggctccaggtttcaggtcccaccactcgcgaatgccctcagagaggttgtcctcgagccaatctggaagataaccatcggcagccatacctgatttaaatcatttattgttcaaagatgcagtcatccaaatccacattgaccagatcgcaggcagtgcaagcgtctggcacctttcccatgatatgatgaatgtagcacagtttctgatacgcctttttgacgacagaaacgggtttagattctgacacgggaaagcactctaaacagtctttctgtccgtgagtgaagcagatatttgaattctgattcattctctcgcattgtctgcagggaaacagcatcagattcatgcccacgtgacgagaacatttgttttggtacctgtctgcgtagttgatcgaagcttccgcgtctgacgtcgatggctgcgcaactgactcgcgcacccgtttgggctcacttatatctgcgtcactgggggcgggtcttttcttggctccaccctttttgacgtagaattcatgctccacctcaaccacgtaatcctttgcccaccggaaaaagtctttgacttcctgcttggtgaccttcccaaagtcatgatccagacggcgggtgagttcaaatttgaacatccggtcttgcaacggctgctggtgttcgaaggtcgttgagttcccgtcgatcacggcgcacatgttggtgttggagatgacgatcgcgggagtcgggtctatctgggccgaggacttgcatttctggtccacgcgcaccttgcttcctccgagaatggctttggccgactccacgaccttggcggtcatcttcccctcctcccaccagatcaccatcttgtcgacacagtcgttgaagggaaagttctcattggtccagttgacgcagccgtagaaagggcgaattc

SEQ ID NO: 141 - protein, 728 aa, Adeno-associated virus
MAADGYLPDWLEDNLSEGIREWWDLKPGAPKPKANQQKQDDGRGLVLPGYKYLRPFNGLDKGEPVNEADAAALEHDKAYDKQLEQGDNPYLKYNHADAEFQERLQEDTSFGGNLGRAVFQAKKRVLEPLGLVEEVAKTAPGKKRPIESPDSSTGIGKKGQQPAKKKLNFGQTGDSESVPDPQPLGEPPAAPSGLGSGTMAAGGGAPMADNNEGADGVGNASGNWHCDSTWLGDRVITTSTRTWALPTYNNHLYKQISSQSGATNDNHFFSYSTPWGYFDFNRFHCHFSPRDWQRLINNNWGFRPRKLRFKLFNIQVKEVTTNDGVTTIANNLTSTIQVFSDSEYQLPYVLGSAHQGCLPPFPADVFMIPQYGYLTLNNGSQSVGRSSFYCLEYFPSQMLRTGNNFEFSYTFEEVPFHSSYVHSQSLDRLMNPLIDQYLYYLARTQSTTGSTRELQFHQAGPNTMAEQSKNWLPGPCYRQQRLSKNIDSNNNSNFAWTGATKYHLNGRNSLTNPGVAMATNKDDEDQFFPINGVLVFGKTGAANKTTLENVLMTSEEEIKTTNPVATEEYGVVSSNLQSSTAGPQTQTVNSQGALPGMVWQNRDVCLQGPIWAKIPHTDGNFHPSPLMGGFGLKHPPPQILIKNTPVPANPPEVFTPAKFASFITQYSTGQVSVEIEWELQKENSKRWNPEIQYTSNYAKSNNVEFAVNNEGVYTEPRPIGTRYLTRNL

SEQ ID NO: 142 - DNA, 3106 bp, Adeno-associated virus
gcggccgcgaattcgcccttcgcagagaccaaagttcaactgaaacgaatcaaccggtttattgattaacaagtaattacaggttacgggtgaggtaacgggtgccaatggggcgaggctcagtataaaccccttcgttgttgacagcaaattccacattattagacttggcataatttgaggtgtactgaatctctggattccagcgtttgctgttttctttctgcagttcccactcgatctccacgctgacctggccggtgctgtactgcgtgataaatgaggcaaacttggcaggagtaaacacctctggaggattagcaggtaccggggtgtttttgatgagaatttgaggaggcgggtgtttgagtccaaatccgcccatcaggggagacgggtgaaagttgccgtccgtgtgaggaattttggcccagatgggaccctgcaggcacacgtcccggttctgccagaccatgccgggcagagccccctggctgttgacagtctgtgtctggggtccggccgtagacgattgcaggttgctggagaccacaccgtattcttctgtagccacgggattggtggttttgatctcctcctcgctggtcattagcacgttttccagcgttgtcttgttggcagcccccgttttgccaaaaaccagcactccgttgatgggaaagaactggtcctcgtcgtccttgttggtggccatggctacgcccgggttggttaatgaatttctaccattcagatggtatttagtggccccggtccaggcaaagttactgttgttgttgctgtctatgttttttgacagtctctgctgccgataacagggtccgggcagccagttctttgattgctcggccatggtgttgggcccagcctgatggaactgcagctcccttgtggaccccgtagtgctctgggtccgggccaggtagtacaggtactggtcgatgaggggattcatcagccggtctaggctctggctgtgcacatagctgctgtggaaaggcacttcctcaaaggtgtagctgaattcaaagttattgcccgttctcagcatctgagaaggaaagtactccaggcagtagaaggaggaacgtcccacagactgactgccgttgtttagagtcagatatccgtactgaggaatcatgaacacgtccgcagggaacggagggaggcagccctggtgcgcagagccgaggacgtacggcagttggtactccgagtccgagaagacctgaatcgtgctggtaaggttattagcgatggtcgtaacgccgtcgttcgtcgtgacctccttgacctggatgttgaacaacttgaaccgcagctttctgggccggaatccccagttgttgttgatgagtcgctgccagtcacgtggtgagaagtggcagtggaatctgttgaagtcaaaatagccccagggggtgctgtagctgaagaagtggttgtcgttggtagccccgctctgacttgatatctgcttgtagaggtggttgttgtaggtgggcagggcccaggtgcgggtgctggtggtgatgactctgtcgcccagccatgtggaatcgcaatgccaatttccggaggcattacccactccgtcggcgccttcgttattgtctgccattggtgcgccaccgcctgcagccattgtaccagatcccagacctgagggcgcggcgggaggttctccgagaggttgggggtcgggcactgactctgagtcgccagtctgcccaaagttgagcttctttttagcgggctgctggcctttcttgccgatgcccgtggaggagtcgggggattctatgggtctcttctttccaggagccgtcttagcgacttcctcaaccagaccgagaggttcgagaacccgcttcttggcctggaagactgctcgcccgaggttgcccccaaaagacgtatcttcttgaagacgctcctgaaactcggcgtcggcgtggttgtacttgaggtacgggttgtccccctgctcgagctgcttgtcgtaggccttgtcgtgctcgagggccgcggcgtctgcctcgttgaccggctctcccttgtcgagtccgttgaagggtctgaggtacttgtagccaggaagcaccagaccccggccgtcgtcctgcttttgctggttggctttgggtttcggggctccaggtttcaagtcccaccactcgcgaatgccctcagagaggttgtcctcgagccaatctggaagataaccatcggcagccatacctggtttaagtcatttattgctcagaaacacagtcatccaggtccacgttgaccagatcgcaggccgagcaagcaatctcgggagcccgccccagcagatgatgaatggcacagagtttccgatacgtcctctttctgacgaccggttgagattctgacacgccggggaaacattctgaacagtctctggtcccgtgcgtgaagcaaatgttgaaattctgattcactctctcgcatgtcttgcagggaaacagcatctgaagcatgcccgcgtgacgagaacatttgttttggtacctgtcggcaaagtccaccggagctccttccgcgtctgacgtcgatggattcgcgactgaggggcaggcccgcttgggctcgcttttatccgcgtcatcgggggcgggtctcttgttggccccaccctttctgacgtagaacccatgcgccacctcggtcacgtgatcctgcgcccagcggaagaaccttttgacttcctgctttgtcaccttgccaaagttatgctccagacggcgggtgggttcaaatttgaacatccggtcctgcaacggctgctggtgctcgaaggtggcgctgttcccgtcaatcacggcgcacatgttggtgttggaggtgacggtcacgggggtggggtcgatctgggcggacgacttgcacttttggtccacgcgcaccttgctgccgccgagaatggccttggcggactccacgaccttggccgtcatcttgccctcctcccaccagatcaccatcttgtcggcgcaatcgttgaagggaaagttctcattggtccagttgacgcagccgtagaaagggcgaattc

SEQ ID NO: 143 - protein, 728 aa, Adeno-associated virus
MAADGYLPDWLEDNLSEGIREWWDLKPGAPKPKANQQKQDDGRGLVLPGYKYLGPFNGLDKGEPVNEADAAALEHDKAYDKQLEQGDNPYLKYNHADAEFQERLQEDTSFGGNLGRAVFQAKKRVLEPLGLVEEGAKTASGKKRPIESPDSSTGIGKKGQQPAKKKLNFGQTGDSESVPDPQPLGEPPAAPSGLGSGTMAAGGGAPMADNNEGADGVGNASGNWHCDSTWLGDRVITTSTRTWALPTYNNHLYKQISSQSGATNDNHFFGYSTPWGYFDFNRFHCHFSPRDWQRLINNNWGFRPRKLRFKLFNIQVKEVTTNDGVTTIANNLTSTIQVFSDSEYQLPYVLGSAHQGCLPPFPADVFMIPQYGYLTLNNGSQSVGRSSFCCLEYFPSQMLRTGNNFEFSYTFEEVPFHSSYAHSQSLDRLMNPLIDQYLYYLARTQSTTGSTRELQFHQAGPNTVAEQSKNWLPGPCYRQQRLSKNIDSNNNSNFAWTGATKYHLNGRNSLTNPGVAMATNKDDEDQFLPINGVLVFGKTGAANKTTLENVLMTSEEEIKTTNPVATEEYGVVSSNLQSSTAGPRTQTVNSQGALPGMVWQNRDVYLQGPIWAEIPHTDGNFHPSPLMGGFGLKHPPPQILIKNTPVPANPPEVFTPAKFASFITQYSTGQVSVEIEWELQKENSKRWNPEIQYTSNYAKSNNVEFAVNNEGVYTEPRPIGTRYLTRNL

SEQ ID NO: 144 - DNA, 3102 bp, Adeno-associated virus
gcggccgcgaattcgcccttcgcagagaccaaagttcaactgaaacgaatcaaccggtttattgattaacaagtaattacaggttacgggtgaggtaacgggtgccaatggggcgaggctcagtataaaccccttcgttgttgacagcaaattccacattattagacttggcataatttgaggtgtactgaatctctggattccagcgtttgctgttttctttctgcagttcccactcgatctccacgctgacctggccggtgctgtactgcgtgataaatgaggcaaacttggcaggagtaaacacctctggaggattagcaggtaccggggtgtttttgatgagaatttgaggaggcgggtgtttgagtccaaatccgcccatcaggggagacgggtgaaagttgccgtccgtgtgaggaatttcggcccagatgggaccctgcaggtacacgtcccggttctgccagaccatgccgggcagagccccctggctgttgacagtctgtgtccggggtccggccgtagacgattgcaggttgctggagaccacaccgtattcttctgtagccacgggattggtggttttgatctcctcctcgctggtcattagcacgttttccagcgttgtcttgttggcagcccccgttttgccaaaaaccagcactccgttgatgggaaggaactggtcctcgtcgtccttgttggtggccatggctacgcccgggttggttaatgaatttctaccattcagatggtatttagtggccccggtccaggcaaagttactgttgttgttgctgtctatgttttttgacagtctctgctgccgataacagggtccgggcagccagttctttgattgctcggccacggtgttgggcccagcctgatggaactgcagctcccttgtggaccccgtagtgctctgggtccgggccaggtagtacaggtactggtcgatgaggggattcatcagccggtccaggctctggctgtgcgcatagctgctgtggaaaggcacttcctcaaaggtgtagctgaattcaaagttattgcccgttctcagcatctgagaaggaaagtactccaggcagcagaaggaggaacgtcccacagactgactgccgttgtttagagtcagatatccgtactgaggaatcatgaacacgtccgcagggaacggagggaggcagccctggtgcgcagagccgaggacgtacggcagttggtactccgagtccgagaagacctgaatcgtgctggtaaggttattagcgatggtcgtaacgccgtcgttcgtcgtgacctccttgacctggatgttgaacaacttgaaccgcagctttctgggccggaatccccagttgttgttgatgagtcgctgccagtcacgtggtgagaagtggcagtggaatctgttgaagtcaaaatagccccagggggtgctgtagccgaagaagtggttgtcgttggtagccccgctctgacttgatatctgcttgtagaggtggttgttgtaggtgggcagggcccaggtgcgggtgctggtggtgatgactctgtcgcccagccatgtggaatcgcaatgccaatttccggaggcattacccactccgtcggcgccttcgttattgtctgccattggtgcgccaccgcctgcagccattgtaccagatcccagacctgagggcgcggcgggaggttctccgagaggttgggggtcgggcactgactctgagtcgccagtctgcccaaagttgagcttctttttagcgggctgctggcctttcttgccgatgcccgtggaggagtcgggggattctatgggtctcttctttccggaagccgtcttagcgccttcctcaaccagaccgagaggttcgagaacccgcttcttggcctggaagactgctcgcccgaggttgcccccaaaagacgtatcttcttgaagacgctcctgaaactcggcgtcggcgtggttgtacttgaggtacgggttgtccccctgctcgagctgcttgtcgtaggccttgtcgtgctcgagggccgcggcgtctgcctcgttgaccggctctcccttgtcgagtccgttgaagggtccgaggtacttgtagccaggaagcaccagaccccggccgtcgtcctgcttttgctggttggctttgggtttcggggctccaggtttcaagtcccaccactcgcgaatgccctcagagaggttgtcctcgagccaatctggaagataaccatcggcagccatacctggtttaagtcatttattgctcagaaacacagtcatccaggtccacgttgaccagatcgcaggccgagcaagcaatctcgggagcccgccccagcagatgatgaatggcacagagtttccgatacgtcctctttctgacgaccggttgagattctgacacgccggggaaacattctgaacagtctctggtcccgtgcgtgaagcaaatgttgaaattctgattcattctctcgcatgtcttgcagggaaacagcatctgaagcatgcccgcgtgacgagaacatttgttttggtacctgtcggcaaagtccaccggagctccttccgcgtctgacgtcgatggatccgcgactgaggggcaagcccgcttgggctcgcttttatccgcgtcatcgggggcgggtctcttgttggctccaccctttctgacgtagaactcatgcgccacctcggtcacgtgatcctgcgcccagcggaagaactctttgacttcctgctttgtcaccttgccaaagtcatgctccagacggcgggtgagttcaaatttgaacatccggtcttgtaacggctgctggtgctcgaaggtggtgctgttcccgtcaatcacggcgcacatgttggtgttggaagtgacgatcacgggggtgggatcgatctgggcggacgacttgcacttttggtccacgcgcaccttgctgccgccgagaatggccttggcggactccacgaccttggccgtcatcttgccctcctcccaccagatcaccatcttgtcgacgcaatcgttgaagggaaagttctcattggtccagttgacgcagccgaagggcgaattc

SEQ ID NO: 145 - protein, 728 aa, Adeno-associated virus
MAADGYLPDWLEDNLSEGIREWWDLKPGAPKPKANQQKQDDGRGLVLPGYRYLGPFNGLDKGEPVNEADAAALEHDKAYDKQLEQGDNPYLKYNHADAEFQERLQEDTSFGGNLGRAVFQAKKRVLEPLGLVEEGAKTAPGKKRPIESPDSSTGIGKNGQPPAKKKLNFGQTGDSESVPDPQPLGEPPAAPSGLGSGTMAAGGGAPMADNNEGADGVGNASGNWHCDSTWLGDRVITTSTRTWALPTYNNHLYKQISSQSGATNDNHFFGYSTPWGYFDFNRFHCHFSPRDWQRLINNNWGFRPRKLRFKLFNIQVKEVTTNDGVTTIANNLTSTIQVFSDSEYQLPYVLGSAHQGCLPPFPADVFMIPQYGYLTLNNGSQSVGRSSFYCLEYFPSQMLRTGNNFEFSYTFEEVPFHSSYAHSQSLDRLMNPLIDQYLYYLARTQSTTGSTRELQFHQAGPNTMAEQSKNWLPGPCYRQQRLSKNIDSNNNSNFAWTGATKYHLNGRNSLTNPGVAMATNKDDEDQFFPINGVLVFGKTGAANKTTLENVLMTSEEEIKTTNPVATEEYGVVSSNLQSSTAGPQTQTVNSQGALPGMVWQNRDVYLQGPIWAKIPHTDGNFHPSPLMGGFGLKHPPPQILIKNTPVPANPPEVFTPAKFASFITQYSTGQVSVEIEWELQKENSKRWNPEIQYTSNYAKSNNVEFAVNNEGVYTEPRPIGTRYLTRNL

SEQ ID NO: 146 - protein, 728 aa, Adeno-associated virus
MAADGYLPDWLEGNLSEGIREWWDLKPGAPKPKANQQKQDDGRGLVLPGYRYLGPFNGLDKGEPVNEADAAALEHDKAYDKQLEQGDNPYLKYNHADAEFQERLQEDTSFGGNLGRAVFQAKKRVLEPLGLVEEGAKTAPGKKRPIESPDSSTGIGKNGQPPAKKKLNFGQTGDSESVPDPQPLGEPPAAPSGLGSGTMAAGGGAPMADNNEGADGVGNASGNWHCDSTWLGDRVITTSTRTWALPTYNNHLYKQISSQSGATNDNHFFGYSTPWGYFDFNRFHCHFSPRDWQRLINNNWGFRPRKLRFKLFNIQVKEVTTNDGVTTIANNLTSTIQVFSDSEYQLPYVLGSAHQGCLPPFPADVFMIPQYGYLTLNNGSQSVGRSSFYCLEYFPSQMLRTGDNFEFSYTFEEVPFHSSYAHSQSLDRLMNPLIDQYLYYLARTQSTTGSTRELQFHQAGPNTMAEQSKNWLPGPCYRQQRLSKNIDSNNNSNFAWTGATKYHLNGRNSLTNPGVAMATNKDDEDQFFPINGVLVFGKTGAANKTTLENVLMTSEEEIKTTNPVATEEYGVVSSNLQSSTAGPQTQTVNSQGALPGMVWQNRDVYLQGPIWAKIPHTDGNFHPSPLMGGFGLKHPPPQILIKNTPVPANPPEVFTPAKFASFITQYSTGQVSVEIEWELQKENSKRWNPEIQYTSNYAKSNNVEFAVNNEGVYTEPRPIGTRYLTRNL

SEQ ID NO: 147 - DNA, 3106 bp, Adeno-associated virus
gcggccgcgaattcgcccttcgcagagaccaaagttcaactgaaacgaatcagccggtttattgattaacaagtaattacaggttacgggtgaggtaacgggtgccaatggggcgaggctcagtataaaccccttcgttgttgacagcaaattccacattattagacttggcataatttgaggtgtactgaatctctggattccagcgtttgctgttttctttctgcagttcccactcgatctccacgctgacctggccggtgctgtactgcgtgataaatgaggcaaacttggcaggagtaaacacctctggaggattagcaggtaccggggtgtttttgatgagaatttgaggaggcgggtgtttgagtccaaatccgcccatcaggggagacgggtgaaagttgccgtccgtgtgaggaattttggcccagatgggaccctgcaggtacacgtcccggttctgccagaccatgccgggcagagccccctggctgttgacagtctgtgtctggggtccggccgtagacgattgcaggttgctggagaccacaccgtattcttctgtagccacgggattggtggttttgatctcctcctcgctggtcattagcacgttttccagcgttgtcttgttggcagcccccgttttgccaaaaaccagcactccgttgatgggaaagaactggtcctcgtcgtccttgttggtggccatggctacgcccgggttggttaatgaatttctaccattcagatggtatttagtggccccggtccaggcaaagttactgttgttgttgctgtctatgttttttgacagtctctgctgccgataacagggtccgggcagccagttctttgattgctcggccatggtgttgggcccagcctgatggaactgcagctcccttgtggaccccgtagtgctctgggtccgggccaggtagtacaggtactggtcgatgaggggattcatcagccggtccaggctctggctgtgcgcatagctgctgtggaaaggcacttcctcaaaggtgtagctgaattcaaagttatcgcccgttctcagcatctgagaaggaaagtactccaggcagtagaaggaggaacgtcccacagactgactgccgttgtttagagtcagatatccgtactgaggaatcatgaacacgtccgcagggaacggagggaggcagccctggtgcgcagagccgaggacgtacggcagttggtactccgagtccgagaagacctgaatcgtgctggtaaggttattagcgatggtcgtaacgccgtcgttcgtcgtgacctccttgacctggatgttgaacaacttgaaccgcagctttctgggccggaatccccagttgttgttgatgagtcgctgccagtcacgtggtgagaagtggcagtggaatctgttgaagtcaaaatagccccagggggtgctgtagccgaagaagtggttgtcgttggtagccccgctctgacttgatatctgcttgtagaggtggttgttgtaggtgggcagggcccaggtgcgggtgctggtggtgatgactctgtcgcccagccatgtggaatcgcaatgccaatttccggaggcattacccactccgtcggcgccttcgttattgtctgccattggtgcgccaccgcctgcagccattgtaccagatcccagacctgagggcgcggcgggaggttctccgagaggttgggggtcgggcactgactctgagtcgccagtctgcccaaagttgagcttctttttagcgggcggctggccgttcttgccgatgcccgtggaggagtcgggggattctatgggtctcttctttccaggagccgtcttagcgccttcctcaaccagaccgagaggttcgagaacccgcttcttggcctggaagactgctcgcccgaggttgcccccaaaagacgtatcttcttgaagacgctcctgaaactcggcgtcggcgtggttgtacttgaggtacgggttgtccccctgctcgagctgcttgtcgtaggccttgtcgtgctcgagggccgcggcgtctgcctcgttgaccggctctcccttgtcgagtccgttgaagggtccgaggtacctgtagccaggaagcaccagaccccggccgtcgtcctgcttttgctggttggctttgggtttcggggctccaggtttcaagtcccaccactcgcgaatgccctcagagaggttgccctcgagccaatctggaagataaccatcggcagccatacctggtttaagtcatttattgctcagaaacacagtcatccaggtccacgttggccagatcgcaggccgagcaagcaatctcgggagcccgccccagcagatgatgaatggcacagagtttccgatacgtcctctttctgacgaccggttgagattctgacacgccggggaaacattctgaacagtctctggtcccgtgcgtgaagcaaatgttgaaattctgattcattctctcgcatgtcttgcaggggaacagcatctgaagcatgcccgcgtgacgagaacatttgttttggtacctgtcggcaaagtccaccggagctccttccgcgtctgacgtcgatggatccgcgactgaggggcaggcccgcttgggctcgcttttatccgcgtcatcgggggcgggtctcttgttggctccaccctttctgacgtagaactcatacgccacctcggtcacgtgatcctgcgcccagcggaagaactctttgacttcctgctttgtcaccttgccaaagtcatgctccagacggcgggtgagttcaaatttgaacatccggtcttgtaacggctgctggtgctcgaaggtggtgctgttcccgtcaatcacggcgcacatgttggtgttggaagtgacgatcacgggggtgggatcgatctgggcggacgacttgcacttttggtccacgcgcaccttgctgccgccgagaatggccttggcggactccacgaccttggccgtcatcctgccctcctcccaccagatcaccatcttgtcgacgcaatcgttgaagggaaagttctcattggtccagttgacgcagccgtagaaagggcgaattc

SEQ ID NO: 148 - protein, 728 aa, Adeno-associated virus
MAADGYLPDWLEDNLSEGIREWWDLKPGAPKPKANQQKQDDGRGLVLPGYKYLGPFNGLDKGEPVNEADAAALEHDKAYDKQLEQGDNPYLKYNHADAEFQERLQEDTSFGGNLGRAVFQAKKRVLEPLGLVEEGAKTAPGKKRPIESPDSSTGIGKKGQQPAKKKLNFGQTGDSESVPDPQPLGEPPAAPSGLGSGTMAAGGGAPMADNNEGADGVGNASGNWHCDSTWLGDRVITTSTRTWALPTYNNHLYKQISSQSGATNDNHFFGYSTPWGYFDFNRFHCHFSPRDWQRLINNNWGFRPRKLRFKLFNIQVKEVTTNDGVTTIANNLTSTIQVFSDSEYQLPYVLGSAHQGCLPPFPADVFMIPQYGYLTLNNGSQSMGRSSFYCLEYFPSQMLRTGNNFEFSYTFEEVPFHSSYAHSQSLDRLMNPLIDQYLYYLARTQSTTGSTRELQFHQAGPNTMAEQSKNWLPGPCYRQQRLSKNIDSNNNSNFAWTGATKYHLNGRNSLTNPGVAMATNKDDEGQFFPINGVLVFGKTGAANKTTLENVLMTSEEEIKTTNPVATEEYGVVSSNLQSSTAGPQTQTVNSQGALPGMVWQNRDVYLQGPIWAKIPHTDGNFHPSPLMGGFGLKHPPPQILIKNTPVPANPPGVFTPALFASFITQYSTGQVSVEIEWELQKENSKRWNPEIQYTSNYAKSNNVEFAVNNEGVYTEPRPIGTRYLTRNL

SEQ ID NO: 149 - DNA, 3098 bp, Adeno-associated virus
gaattcgcccttcgcagagaccaaagttcaactgaaacgaatcaaccggtttattgattaacaagtaattacaggttacgggtgaggtaacgggtgccaatggggcgaggctcagtataaaccccttcgttgttgacagcaaattccacattattagacttggcataatttgaggtgtactgaatctctggattccagcgtttgctgttttctttctgcagttcccactcgatctccacgctgacctggccggtgctgtactgcgtgataaatgaggcaaactaggcaggagtaaacacccctggaggattagcaggtaccggggtgtttttgatgagaatttgaggaggcgggtgtttgagtccaaatccgcccatcaggggagacgggtgaaagttgccgtccgtgtgaggaattttggcccagatgggaccctgcaggtacacgtcccggttctgccagaccatgccgggcagagccccctggctgttgacagtctgtgtctggggtccggccgtagacgattgcaggttgctggagaccacaccgtattcttctgtagccacgggattggtggttttgatctcctcctcgctggtcattagcacgttttccagcgttgtcttgttggcagcccccgttttgccaaaaaccagcactccgttgatgggaaagaactggccctcgtcgtccttgttggtggccatggctacgcccgggttggttaatgaatttctaccattcagatggtatttagtggccccggtccaggcaaagttactgttgttgttgctgtctatgttttttgacagtctctgctgccgataacagggtccgggcagccagttctttgattgctcggccatggtgttgggcccagcctgatggaactgcagctcccttgtggaccccgtagtgctctgggtccgggccaggtagtacaggtactggtcgatgaggggattcatcagccggtccaggctctggctgtgcgcatagctgctgtggaaaggcacttcctcaaaggtgtagctgaattcaaagttattgcccgttctcagcatctgagaaggaaagtactccaggcagtagaaggaggaacgtcccatagactgactgccgttgtttagagtcagatatccgtactgaggaatcatgaacacgtccgcagggaacggagggaggcagccctggtgcgcagagccgaggacgtacggcagttggtactccgagtccgagaagacctgaatcgtgctggtaaggttattagcgatggtcgtaacgccgtcgttcgtcgtgacctccttgacctggatgttgaacaacttgaaccgcagctttctgggccggaatccccagttgttgttgatgagtcgctgccagtcacgtggtgagaagtggcagtggaatctgttgaagtcaaaatagccccagggggtgctgtagccgaagaagtggttgtcgttggtagccccgctctgacttgatatctgcttgtagaggtggttgttgtaggtgggcagggcccaggtgcgggtgctggtggtgatgactctgtcgcccagccatgtggaatcgcaatgccaatttccggaggcattacccactccgtcggcgccttcgttattgtctgccattggtgcgccaccgcctgcagccattgtaccagatcccagacctgagggcgcggcgggaggttctccgagaggttgggggtcgggcactgactctgagtcgccagtctgcccaaagttgagcttctttttagcgggctgctggcctttcttgccgatgcccgtggaggagtcgggggattctatgggtctcttctttccaggagccgtcttagcgccttcctcaaccagaccgagaggttcgagaacccgcttcttggcctggaagactgctcgcccgaggttgcccccaaaagacgtatcttcttgaagacgctcctgaaactcagcgtcggcgtggttgtacttgaggtacgggttgtccccctgctcgagctgcttgtcgtaggccttgtcgtgctcgagggccgcggcgtctgcctcgttgaccggctctcccttgtcgagtccgttgaagggtccgaggtacttgtagccaggaagcaccagaccccggccgtcgtcctgcttttgctggttggctttgggtttcggggctccaggtttcaagtcccaccactcgcgaatgccctcagagaggttgtcctcgagccaatctggaagataaccatcggcagccatacctggtttaagtcatttattgctcagaaacacagtcatccaggtccacgttgaccagatcgcaggccgagcaagcaatctcgggagcccgccccagcagatgatgaatggcacagagtttccgatacgtcctctttctgacgaccggttgagattctgacacgccggggaaacattctgaacagtctctggtcccgtgcgtgaagcaaatgttgaaattctgattcattctctcgcatgtcttgcagggaaacagcatctgaagcatgcccgcgtgacgagaacatttgttttggtacctgtcggcaaagtccaccggagctccttccgcgtctgacgtcgatggatccgcgactgaggggcaggcccgcttgggctcgcttttatccgcgtcatcgggggcgggcctcttgttggctccaccctttctgacgtagaactcatgcgccacctcggtcacgtgatcctgcgcccagcggaagaactctttgacttcctgctttgtcaccttgccaaagtcctgctccagacggcgggtgagttcaaatttgaacatccggtcttgtaacggctgctggtgctcgaaggtggtgctgttcccgtcaatcacggcgcacatgttggtgttggaagtgacgatcacgggggtgggatcgatctgggcggacgacttgcacttttggtccacgcgcaccttgctgccgccgagaatggccttggcggactccacgaccttggccgtcatcttgccctcctcccaccagatcaccatcttgtcgacgcaatcgttgaagggaaagttctcattggtccagttgacgcagccgtagaaagggcgaattc

SEQ ID NO: 150 - DNA, 2187 bp, Adeno-associated virus
atggctgccgatggttatcttccagattggctcgagggcaacctctctgagggcattcgcgagtggtgggacttgaaacctggagccccgaaacccaaagccaaccagcaaaagcaggacgacggccggggtctggtgcttcctggctacaggtacctcggacccttcaacggactcgacaagggagagccggtcaacgaggcagacgccgcggccctcgagcacgacaaggcctacgacaagcagctcgagcagggggacaacccgtacctcaagtacaaccacgccgacgccgagtttcaggagcgtcttcaagaagatacgtcttttgggggcaacctcgggcgagcagtcttccaggccaagaagcgggttctcgaacctctcggtctggttgaggaaggcgctaagacggctcctggaaagaagagacccatagaatcccccgactcctccacgggcatcggcaagaacggccagccgcccgctaaaaagaagctcaactttgggcagactggcgactcagagtcagtgcccgacccccaacctctcggagaacctcccgccgcgccctcaggtctgggatctggtacaatggctgcaggcggtggcgcaccaatggcagacaataacgaaggcgccgacggagtgggtaatgcctccggaaattggcattgcgattccacatggctgggcgacagagtcatcaccaccagcacccgcacctgggccctgcccacctacaacaaccacctctacaagcagatatcaagtcagagcggggctaccaacgacaaccacttcttcggctacagcaccccctggggctattttgacttcaacagattccactgccacttctcaccacgtgactggcagcgactcatcaacaacaactggggattccggcccagaaagctgcggttcaagttgttcaacatccaggtcaaggaggtcacgacgaacgacggcgttacgaccatcgctaataaccttaccagcacgattcaggtcttctcggactcggagtaccaactgccgtacgtcctcggctctgcgcaccagggctgcctccctccgttccctgcggacgtgttcatgattcctcagtacggatatctgactctaaacaacggcagtcagtctgtgggacgttcctccttctactgcctggagtactttccttctcagatgctgagaacgggcgataactttgaattcagctacacctttgaggaagtgcctttccacagcagctatgcgcacagccagagcctggaccggctgatgaatcccctcatcgaccagtacctgtactacctggcccggacccagagcactacggggtccacaagggagctgcagttccatcaggctgggcccaacaccatggccgagcaatcaaagaactggctgcccggaccctgttatcggcagcagagactgtcaaaaaacatagacagcaacaacaacagtaactttgcctggaccggggccactaaataccatctgaatggtagaaattcattaaccaacccgggcgtagccatggccaccaacaaggacgacgaggaccagttctttcccatcaacggagtgctggtttttggcaaaacgggggctgccaacaagacaacgctggaaaacgtgctaatgaccagcgaggaggagatcaaaaccaccaatcccgtggctacagaagaatacggtgtggtctccagcaacctgcaatcgtctacggccggaccccagacacagactgtcaacagccagggggctctgcccggcatggtctggcagaaccgggacgtgtacctgcagggtcccatctgggccaaaattcctcacacggacggcaactttcacccgtctcccctgatgggcggatttggactcaaacacccgcctcctcaaattctcatcaaaaacaccccggtacctgctaatcctccagaggtgtttactcctgccaagtttgcctcatttatcacgcagtacagcaccggccaggtcagcgtggagatcgagtgggaactgcagaaagaaaacagcaaacgctggaatccagagattcagtacacctcaaattatgccaagtctaataatgtggaatttgctgtcaacaacgaaggggtttatactgagcctcgccccattggcacccgttacctcacccgtaacctgtaa

SEQ ID NO: 151 - protein, 728 aa, Adeno-associated virus; identical to SEQ ID NO: 146

SEQ ID NO: 152 - protein, 728 aa, Adeno-associated virus
MAADGYLPDWLEDNLSEGIREWWDLKPGAPKPKANQQKQDDGRGLVLPGYRYLGPFNGLDKGEPVNEADAAALEHDKAYDKQLEQGDNPYLKYNHADAEFQERLQEDTSFGGNLGRAVFQAKKRVLEPLGLVEEGAKTAPGKKRPIESPDSSTGIGKNGQPPAKKKLNFGQTGDSESVPDPQPLGEPPAAPSGLGSGTMAAGGGAPMADNNEGADGVGNASGNWHCDSTWLGDRVITTSTRTWALPTYNNHLYKQISSQSGATNDNHFFGYSTPWGYFDFNRFHCHFSPRDWQRLINNNWGFRPRKLRFKLFNIQVKEVTTNDGVTTIANNLTSTIQVFSDSEYQLPYVLGSAHQGCLPPFPADVFMIPQYGYLTLNNGSQSVGRSSFYCLEYFPSQMLRTGDNFEFSYTFEEVPFHSSYAHSQSLDRLMNPLIDQYLYYLARTQSTTGSTRELQFHQAGPNTMAEQSKNWLPGPCYRQQRLSKNIDSNNNSNFAWTGATKYHLNGRNSLTNPGVAMATNKDDEDQFFPINGVLVFGKTGAANKTTLENVLMTSEEEIKTTNPVATEEYGVVSSNLQSSTAGPQTQTVNSQGALPGMVWQNRDVYLQGPIWAKIPHTDGNFHPSPLMGGFGLKHPPPQILIKNTPVPANPPEVFTPAKFASFITQYSTGQVSVEIEWELQKENSKRWNPEIQYTSNYAKSNNVEFAVNNEGVYTEPRPIGTRYLTRNL

SEQ ID NO: 153 - protein, 728 aa, Adeno-associated virus; identical to SEQ ID NO: 145

SEQ ID NO: 154 - protein, 728 aa, Adeno-associated virus
MAADGYLPDWLEDNLSEGIREWWDLKPGAPKPKANQQKQDDGRGLVLPGYKYLGPFNGLDKGEPVNEADAAALEHDKAYDKQLEQGDNPYLKYNHADAEFQERLQEDTSFGGNLGRAVFQAKKRVLEPLGLVEEGAKTAPGKKRPIESPDSSTGIGKNGQPPAKKKLNFGQTGDSESVPDPQPLGEPPAAPSGLGSGTMAAGGGAPMADNNEGADGVGNASGNWHCDSTWLGDRVITTSTRTWALPTYNNHLYKQISSQSGATNDNHFFGYSTPWGYFDFNRFHCHFSPRDWQRLINNNWGFRPRKLRFKLFNIQVKEVTTNDGVTTIANNLTSTIQVFSDSEYQLPYVLGSAHQGCLPPFPADVFMIPQYGYLTLNNGSQSVGRSSFYCLEYFPSQMLRTGNNFEFSYTFEEVPFHSSYAHSQSLDRLMNPLIDQYLYYLARTQSTTGSTRELQFHQAGPNTMAEQSKNWLPGPCYRQQRLSKNIDSNNNSNFAWTGATKYHLNGRNSLTNPGVAMATNKDDEDQFFPINGVLVFGKTGAANKTTLENVLMTSEEEIKTTNPVATEEYGVVSSNLQSSTAGPQTQTVNSQGALPGMVWQNRDVYLQGPIWAKIPHTDGNFHPSPLMGGFGLKHPPPQILIKNTPVPANPPEVFTPAKFASFITQYSTGQVSVEIEWELQKENSKRWNPEIQYTSNYAKSNNVEFAVNNEGVYTEPRPIGTRYLTRNL

SEQ ID NO: 155 - protein, 728 aa, Adeno-associated virus
MAADGYLPDWLEDNLSEGIREWWDLKPGAPKPKANQQKQDDGRGLVLPGYKYLGPFNGLDKGEPVNEADAAALEHDKAYDKQLEQGDNPYLKYNHADAEFQERLQEDTSFGGNLGRAVFQAKKRVLEPLGLVEEGAKTAPGKKRPIESPDSSTGIGKKGQQPAKKKLNFGQTGDSESVPDPQPLGEPPAAPSGLGSGTMAAGGGAPMADNNEGADGVGNASGNWHCDSTWLGDRVITTSTRTWALPTYNNHLYKQISSQSGATNDNHFFGYSTPWGYFDFNRFHCHFSPRDWQRLINNNWGFRPRKLRFKLFNIQVKEVTTNDGVTTIANNLTSTIQVFSDSEYQLPYVLGSAHQGCLPPFPADVFMIPQYGYLTLNNGSQSVGRSSFYCLEYFPSQMLRTGNNFEFSYTFEEVPFHSSYAHSQSLDRLMNPLIDQYLYYLARTQSTTGSTRELQFHQAGPNTMAEQSKNWLPGPCYRQQRLSKNIDSNNNSNFAWTGATKYHLNGRNSLTNPGVAMATNKDDEDQFFPINGVLVFGKTGAANKTTLENVLMTSEEEIKTTNPVATEEYGVVSSNLQSSTAGPQTQTVNSQGALPGMVWQNRDVYLQGPIWAKIPHTDGNFHPSPLMGGFGLKHPPPQILIKNTPVPANPPEVFTPAKFASFITQYSTGQVSVEIEWELQKENSKRWNPEIQYTSNYAKSNNVEFAVNNEGVYTEPRPIGTRYLTRNL

SEQ ID NO: 156 - DNA, 2215 bp, Artificial Sequence
  Description of Artificial Sequence: Synthetic polynucleotide
atggctgccgatggttatcttccagattggctcgaggacactctctctgaaggaataagacagtggtggaagctcaaacctggcccaccaccaccaaagcccgcagagcggcataaggacgacagcaggggtcttgtgcttcctgggtacaagtacctcggacccttcaacggactcgacaagggagagccggtcaacgaggcagacgccgcggccctcgagcacgacaaagcctacgaccggcagctcgacagcggagacaacccgtacctcaagtacaaccacgccgacgccgagttccaggagcggctcaaagaagatacgtcttttgggggcaacctcgggcgagcagtcttccaggccaaaaagaggcttcttgaacctcttggtctggttgaggaagcggctaagacggctcctggaaagaagaggcctgtagagcactctcctgtggagccagactcctcctcgggaaccggaaaggcgggccagcagcctgcaagaaaaagattgaattttggtcagactggagacgcagactcagtcccagaccctcaaccaatcggagaacctcccgcagccccctcaggtgtgggatctcttacaatggctgcaggcggtggcgcaccaatggcagacaataacgagggcgccgacggagtgggtaattcctcgggaaattggcattgcgattccacatggatgggcgacagagtcatcaccaccagcacccgaacctgggccctgcccacctacaacaaccacctctacaagcaaatctccaacagcacatctggaggatcttcaaatgacaacgcctacttcggctacagcaccccctgggggtattttgactttaacagattccactgccacttttcaccacgtgactggcagcgactcatcaacaacaactggggattccggcccaagagactcagcttcaagctcttcaacatccaggtcaaggaggtcacgcagaatgaaggcaccaagaccatcgccaataacctcaccagcaccatccaggtgtttacggactcggagtaccagctgccgtacgttctcggctctgcccaccagggctgcctgcctccgttcccggcggacgtgttcatgattccccagtacggctacctaacactcaacaacggtagtcaggccgtgggacgctcctccttctactgcctggaatactttccttcgcagatgctgagaaccggcaacaacttccagtttacttacaccttcgaggacgtgcctttccacagcagctacgcccacagccagagcttggaccggctgatgaatcctctgattgaccagtacctgtactacttgtctcggactcaaacaacaggaggcacgacaaatacgcagactctgggcttcagccaaggtgggcctaatacaatggccaatcaggcaaagaactggctgccaggaccctgttaccgccagcagcgagtatcaaagacatctgcggataacaacaacagtgaatactcgtggactggagctaccaagtaccacctcaatggcagagactctctggtgaatccgggcccggccatggcaagccacaaggacgatgaagaaaagtttttttcctcagagcggggttctcatctttgggaagcaaggctcagagaaaacaaatgtggacattgaaaaggtcatgattacagacgaagaggaaatcaggacaaccaatcccgtggctacggagcagtatggttctgtatctaccaacctccagagaggcaacagacaagcagctaccgcagatgtcaacacacaaggcgttcttccaggcatggtctggcaggacagagatgtgtaccttcaggggcccatctgggcaaagattccacacacggacggacattttcacccctctcccctcatgggtggattcggacttaaacaccctccgcctcagatcctgatcaagaacacgcctgtacctgcggatcctccgaccaccttcaaccagtcaaagctgaactctttcatcacccagtattctactggccaagtcagcgtggagatcgagtgggagctgcagaaggaaaacagcaagcgctggaaccccgagatccagtacacctccaactactacaaatctacaagtgtggactttgctgttaatacagaaggcgtgtactctgaaccccgccccattggcacccgttacctcacccgtaatctgtaa

SEQ ID NO: 157 - protein, 737 aa, Artificial Sequence
  Description of Artificial Sequence: Synthetic polypeptide
MAADGYLPDWLEDTLSEGIRQWWKLKPGPPPPKPAERHKDDSRGLVLPGYKYLGPFNGLDKGEPVNEADAAALEHDKAYDRQLDSGDNPYLKYNHADAEFQERLKEDTSFGGNLGRAVFQAKKRLLEPLGLVEEAAKTAPGKKRPVEHSPVEPDSSSGTGKAGQQPARKRLNFGQTGDADSVPDPQPIGEPPAAPSGVGSLTMAAGGGAPMADNNEGADGVGNSSGNWHCDSTWMGDRVITTSTRTWALPTYNNHLYKQISNSTSGGSSNDNAYFGYSTPWGYFDFNRFHCHFSPRDWQRLINNNWGFRPKRLSFKLFNIQVKEVTQNEGTKTIANNLTSTIQVFTDSEYQLPYVLGSAHQGCLPPFPADVFMIPQYGYLTLNNGSQAVGRSSFYCLEYFPSQMLKTGNNFQFTYTFEDVPFHSSYAHSQSLDRLMNPLIDQYLYYLSRTQTTGGTTNTQTLGFSQGGPNTMANQAKNWLPGPCYRQQRVSKTSADNNNSEYSWTGATKYHLNGRDSLVNPGPAMASHKDDEEKFFPQSGVLIFGKQGSEKTNVDIEKVMITDEEEIRTTNPVATEQYGSVSTNLQRGNRQAATADVNTQGVLPGMVWQDRDVYLQGPIWAKIPHTDGHFHPSPLMGGFGLKHPPPQILIKNTPVPADPPTTFNQSKLNSFITQYSTGQVSVEIEWELQKENSKRWNPEIQYTSNYYKSTSVDFAVNTEGVYSEPRPIGTRYLTRNL

SEQ ID NO: 158 - protein, 737 aa, Artificial Sequence
  Description of Artificial Sequence: Synthetic polypeptide
MAADGYLPDWLEDTLSEGIRQWWKLKPGPPPPKPAERHKDDSRGLVLPGYKYLGPFNGLDKGEPVNEADAAALEHDKAYDRQLDSGDNPYLKYNHADAEFQERLKEDTSFGGNLGRAVFQAKKRLLEPLGLVEEAAKTAPGKKRPVEHSPVEPDSSSGTGKAGQQPARKRLNFGQTGDADSVPDPQPIGEPPAAPSGVGSLTMAAGGGAPMADNNEGADGVGNSSGNWHCDSTWMGDRVITTSTRTWALPTYNNHLYKQISNSTSGGSSNDNAYFGYSTPWGYFDFNRFHCHFSPRDWQRLINNNWGFRPKRLSFKLFNIQVKEVTQNEGTKTIANNLTSTIQVFTDSEYQLPYVLGSAHQGCLPPFPADVFMIPQYGYLTLNNGSQAVGRSSFYCLEYFPSQMLKTGNNFQFTYTFEDVPFHSSYAHSQSLDRLMNPLIDQYLYYLSRTQTTGGTTNTQTLGFSQGGPNTMANQAKNWLPGPCYRQQRVSKTSADNNNSEYSWTGATKYHLNGRDSLVNPGPAMASHKDDEEKFFPQSGVLIFGKQGSEKTNVDIEKVMITDEEEIRTTNPVATEQYGSVSTNLQQGNTQAATADVNTQGVLPGMVWQDRDVYLQGPIWAKIPHTDGHFHPSPLMGGFGLKHPPPQILIKNTPVPADPPTTFNQSKLNSFITQYSTGQVSVEIEWELQKENSKRWNPEIQYTSNYYKSTSVDFAVNTEGVYSEPRPIGTRYLTRNL

SEQ ID NO: 159 - protein, 737 aa, Artificial Sequence
  Description of Artificial Sequence: Synthetic polypeptide
MAADGYLPDWLEDTLSEGIRQWWKLKPGPPPPKPAERHKDDSRGLVLPGYKYLGPFNGLDKGEPVNEADAAALEHDKAYDRQLDSGDNPYLKYNHADAEFQERLKEDTSFGGNLGRAVFQAKKRLLEPLGLVEEAAKTAPGKKRPVEHSPVEPDSSSGTGKAGQQPARKRLNFGQTGDADSVPDPQPIGEPPAAPSGVGSLTMAAGGGAPMADNNEGADGVGNSSGNWHCDSTWMGDRVITTSTRTWALPTYNNHLYKQISNSTSGGSSNDNAYFGYSTPWGYFDFNRFHCHFSPRDWQRLINNNWGFRPKRLSFKLFNIQVKEVTQNEGTKTIANNLTSTIQVFTDSEYQLPYVLGSAHQGCLPPFPADVFMIPQYGYLTLNNGSQAVGRSSFYCLEYFPSQMLRTGNNFQFTYTFEDVPFHSSYAHSQSLDRLMNPLIDQYLYYLSRTQTTGGTTNTQTLGFSQGGPNTMANQAKNWLPGPCYRQQRVSKTSADNNNSEYSWTGATKYHLNGRDSLVNPGPAMASHKDDEEKFFPQSGVLIFGKQGSEKTNVDIEKVMITDEEEIRTTNPVATEQYGSVSTNLQQGNTQAATADVNTQGVLPGMVWQDRDVYLQGPIWAKIPHTDGHFHPSPLMGGFGLKHPPPQILIKNTPVPADPPTTFNQSKLNSFITQYSTGQVSVEIEWELQKENSKRWNPEIQYTSNYYKSTSVDFAVNTEGVYSEPRPIGTRYLTRNL

SEQ ID NO: 160 - protein, 729 aa, Adeno-associated virus
MAADGYLPDWLEDNLSEGIREWWDLKPGAPKPKANQQKQDDGRGLVLPGYKYLGPFNGLDKGEPVNAADAAALEHDKAYDQQLKAGDNPYLRYNHADAEFQERLQEDTSFGGNLGRAVFQAKKRVLEPLGLVEEGAKTAPGKKRPIDSPDSSTGIGKKGQQPAKKKLNFGQTGDSESVPDPQPLGEPPAAPSSVGSGTMAAGGGAPTADNNEGADGVGNASGNWHCDSTWLGDRVITTSTRTWALPTYNNHLYKQISSSSSGATNDNHYFGYSTPWGYFDFNRFHCHFSPRDWQRLINNNWGFRPKKLRFKLFNIQVKEVTTNDGVTTIANNLTSTVQVFSDSEYQLPYVLGSAHQGCLPPFPADVFMIPQYGYLTLNNGSQSVGRSSFYCLEYFPSQMLRTGNNFEFSYSFEDVPFHSSYAHSQSLDRLMNPLIDQYLYYLARTQSTTGSTRELQFHQAGPNTMAEQSKNWLPGPCYRQQRLSKNLDFNNNSNFAWTAATKYHLNGRNSLTNPGIPMATNKDDEDQFFPINGVLVFGKTGAANKTTLENVLMTSEEEIKTTNPVATEEYGVVSSNLQSSTAGPQSQTINSQGALPGMVWQNRDVYLQGPIWAKIPHTDGNFHPSPLMGGFGLEHPPPQILIKNTPVPANPPEVFTPAKFASFITQYSTGQVSVEIEWELQKENSKRWNPEIQYTSNYAKSNNVEFAVNPDGVYTEPRPIGTRYLTRNL

SEQ ID NO: 161 - DNA, 3075 bp, Adeno-associated virus
tgagaactttcctttcaacgattgcgtcggacaagatggtgatctggtgggaggaggggaagatgaccgccaaggtcgtggagtcggccaaagccattcttggaggaagcaaggtgcgtgtggaccagaaatgcaagtcctcggcccagatagacccgactcccgtgatcgtcacctccaacaccaacatgtgcgccgtgattgacgggaactcaacgaccttcgagcaccagcagccgttgcaagaccggatgttcaaatttgaacttacccgccgtctggatcatgactttggaaaggtcaccaagcaggaagtgaaagactttttccggtgggcaaaggatcacgtggttgaggtggagcatgaattctacgtcaaaaagggtggagctaagaaaagacccgcccccagtgacgcagatataagtgagcccaaacgggcgcgcgagtcagttgcgcagccatcaacgtcagacgcggaagcttcgatcaactacgcggacaggtaccaaaaacaaatgttctcgtcacgtgggcatgaatctgatgctgtttccctgcagacaatgcgagagaatgaatcagaattcaaatatctgcttcactcacggacagaaagactgtttagagtgctttcccgtgtcagaatctcaacccgtttctgtcgtcaaaaaggcgtatcagaaactgtgctacattcatcatatcatgggaaaggtgccagacgcttgcactgcctgcgatctggtcaatgtggatttggatgactgcatctctgaacaataaatgatttaaatcaggtatggctgccgatggttatcctccagattggctcgaggacactctctctgaagggataagacagtggtggaagctcaaacctggcccaccaccaccaaagcccgcagagcggcataaggacgacagcaggggtcttgtgcttcctgggtacaagtacctcggacccttcaacggactcgacaagggggagccggtcaacgaggcagacgccgcggccctcgagcacgacaaggcctacgaccggcagctcgacagcggagacaacccgtacctcaagtacaaccacgccgacgcagagtttcaggagcgccttaaagaagatacgtcttttgggggcaacctcggacgagcagtcttccaggcgaaaaagagggttcttgaacctctgggcctggttgaggaacctgttaagacggctccgggaaaaaagaggccggtagagcactctcctgtggagccagactcctcctcgggaaccggaaaagcgggccagcggcctgcaagaaaaagattaaattttggtcagactggagacgcagactccgtacctgacccccagcctctcggacagccaccagcagccccctctggtctgggatctactacaatggctacaggcagtggcgcaccaatggcagacaataacgagggtgccgatggagtgggtaattcctcaggaaattggcattgcgattcccaatggctgggcgacagagtcatcaccaccagcacccgaacctgggccctgcccacatacaacaaccacctctacaagcaaatctccagccaatcaggagccagcaacgacaaccactactttggctacagcaccccctgggggtattttgacttcaacagattccactgccacttttcaccacgtgactggcaaagactcatcaacaacaactggggattccggcccaaaagactcaacttcaagctctttaatattcaagtcaaagaggtcacgcagaatgacggtacgacgacgattgccaataaccttaccagcacggttcaggtgtttactgactcggagtaccagctcccgtacgtcctgggctcggcgcatcaaggatgcctcccgccgtttccagcggacgtcttcatggtcccacagtatggatacctcaccctgaacaacgggagtcaggcggtaggacgctcttccttttactgcctggagtactttccttctcagatgctgcgtactggaaacaactttcagttcagctacacttttgaagacgtgcctttccacagcagctacgctcacagccagagtctggatcggctgatgaatcctctgatcgaccagtacctgtattatctgaacaagacacaaacaaatagtggaactcttcagcagtctcggctactgtttagccaagctggaccaaccaacatgtctcttcaagctaaaaactggctgcctggaccttgctacagacagcagcgtctgtcaaaacaggcaaacgacaacaacaacagcaactttccctggactgcagctacaaagtatcatctaaatggccgggactcgttggttaatccaggaccagctatggccagtcacaaggatgacgaagaaaagtttttccccatgcatggaaccctgatatttggtaaacaaggaacaaatgccaacgacgcggatttggaaaatgtcatgattacagatgaagaagaaatcagggccaccaatcccgtggctacggagcagtacgggactgtgtcaaataatttgcaaaactcaaacactggtccaactactggaactgtcaatcgccaaggagcgttacctggtatggtgtggcaggatcgagacgtgtacctgcagggacccatttgggccaagattcctcacaccgatggacactttcatccttctccactgatgggaggttttggactcaaacacccgcctcctcagatcatgatcaaaaacactcccgttccagccaatcctcccacaaacttcagttctgccaagtttgcttctttcatcacacagtattccacgggacaggtcagcgtggagatcgagtgggagctgcagaaggagaacagcaaacgctggaatcccgaaattcagtacacttccaactacaacaagtctgttaatgtggactttactgtggacactaatggtgtgtattcagagcctcgccccattggcaccagatacctgactcgtaatctgtaattgcttgttaatcaataaaccgtttaattcgtttcagttgaactttggtctctgcgaagggcgaa

SEQ ID NO: 162 - DNA, 3142 bp, Adeno-associated virus
aaaacgacgggccagtgattgtaatacgactcactatagggcgaaattgaaattagcggccgcgaattcgcctttcgcagagaccaaagttcaactgaaacgaattaaacggtttattgattaacaagcaattacagattacgagtcaggtatctggtgccaatggggcgaggctctgaatacacaccattagtgtccacagtaaagtccacattaacagacttgttgtagttggaagtgtactgaatttcgggattccagcgtttgctgttctccttctgcagctcccactcgatctccacgctgacctgtcccgtggaatactgtgtgatgaaagaagcaaacttggcagaactgaagtttgtgggaggattggctggaacgggagtgtttttgatcatgatctgaggaggcgggtgtttgagtccaaaacctcccatcagtggagaaggatgaaagtgtccatcggtgtgaggaatcttggcccaaatgggtccctgcaggtacacgtctcgatcctgccacaccataccaggtaacgctccttggtgattgacagttccagtagttggaccagtgtttgagttttgcaaattatttgacacagtcccgtactgctccgtagccacgggattggtggccctgatttcttcttcatctgtaatcatgacattttccaaatccgcgtcgttggcatttgttccttgtttaccaaatatcagggttccatgcatggggaaaaacttttcttcgtcatccttgtgactggccatagctggtcctggattaaccaacgagtcccggccatttagatgatactttgtagctgcagtccagggaaagttgctgttgttgttgtcgtttgcctgttttgacagacgctgctgtctgtagcaaggtccaggcagccagtttttagcttgaagagacatgttggttggtccagcttggctaaacagtagccgagactgctgaagagttccactatttgtttgtgtcttgttcagataatacaggtactggtcgatcagaggattcatcagccgatccagactctggctgtgagcgtagctgctgtggaaaggcacgtcttcaaaagtgtagctgaactgaaagttgtttccagtacgcagcatctgagaaggaaagtactccaggcagtaaaaggaagagcgtcctaccgcctgactcccgttgttcagggtgaggtatccatactgtgggaccatgaagacgtccgctggaaacggcgggaggcatccttgatgcgccgagcccaggacgtacgggagctggtactccgagtcagtaaacacctgaaccgtgctggtaaggttattggcaatcgtcgtcgtaccgtcattctgcgtgacctctttgacttgaatattaaagagcttgaagttgagtcttttgggccggaatccccggttgttgttgacgagtctttgccagtcacgtggtgaaaagtggcagtggaatctgttgaagtcaaaatacccccagggggtgctgtagccaaagtagtggttgtcgttgctggctcctgattggctggagatttgcttgtagaggtggttgttgtatgtgggcagggcccaggttcgggtgctggtggtgatgactctgtcgcccagccattgggaatcgcaatgccaatttcctgaggaattacccactccatcggcaccctcgttattgtctgccattggtgcgccactgcctgtagccattgtagtagatcccagaccagagggggctgctggtggctgtccgagaggctgggggtcaggtacggagtctgcgtctccagtctgaccaaaatttaatctttttcttgcaggctgctggcccgcttttccggttcccgaggaggagtctggctccacaggagagtgctctaccggcctcttttttcccggagccgtcttaacaggctcctcaaccaggcccagaggttcaagaaccctctttttcgcctggaagactgctcgtccgaggttgcccccaaaagacgtatcttctttaaggcgctcctgaaactctgcgtcggcgtggttgtacttgaggtacgggttgtctccgctgtcgagctgccggtcgtaggccttgtcgtgctcgagggccgcggcgtctgcctcgttgaccggctcccccttgtcgagtccgttgaagggtccgaggtacttgtacccaggaagcacaagacccctgctgtcgtccttatgccgctctgcgggctttggtggtggtgggccaggtttgagcttccaccactgtcttattccttcagagagagtgtcctcgagccaatctggaagataaccatcggcagccatacctgatttaaatcatttattgttcagagatgcagtcatccaaatccacattgaccagatcgcaggcagtgcaagcgtctggcacctttcccatgatatgatgaatgtagcacagtttctgatacgcctttttgacgacagaaacgggttgagattctgacacgggaaagcactctaaacagtctttctgtccgtgagtgaagcagatatttgaattctgattcattctctcgcattgtctgcagggaaacagcatcagattcatgcccacgtgacgagaacatttgttttggtacctgtccgcgtagttgatcgaagcttccgcgtctgacgtcgatggctgcgcaactgactcgcgcgcccgtttgggctcacttatatctgcgtcactgggggcgggtcttttcttagctccaccctttttgacgtagaattcatgctccacctcaaccacgtgatcctttgcccaccggaaaaagtctttcacttcctgcttggtgacctttccaaagtcatgatccagacggcgggtaagttcaaatttgaacatccggtcttgcaacggctgctggtgctcgaaggtcgttgagttcccgtcaatcacggcgcacatgttggtgttggaggtgacgatcacgggagtcgggtctatctgggccgaggacttgcatttctggtccacacgcaccttgcttcctccaagaatggctttggccgactccacgaccttggcggtcatcttcccctcctcccaccagatcaccatcttgtcgacgcaatggtaaaaggaaagttctcattgg

SEQ ID NO: 163 - protein, 735 aa, Adeno-associated virus 2
MAADGYLPDWLEDTLSEGIRQWWKLKPGPPPPKPAERHKDDSRGLVLPGYKYLGPFNGLDKGEPVNEADAAALEHDKAYDRQLDSGDNPYLKYNHADAEFQERLKEDTSFGGNLGRAVFQAKKRVLEPLGLVEEPVKTAPGKKRPVEHSPVEPDSSSGTGKAGQQPARKRLNFGQTGDADSVPDPQPLGEPPATPAAVGPTTMASGGGAPMADNNEGADGVGNASGNWHCDSTWLGDRVITTSTRTWALPTYNNHLYKQISSASTGASNDNHYFGYSTPWGYFDFNRFHCHFSPRDWQRLINNNWGFRPKRLNFKLFNIQVKEVTQNDGTTTIANNLTSTVQVFTDSEYQLPYVLGSAHQGCLPPFPADVFMIPQYGYLTLNNGSQAVGRSSFYCLEYFPSQMLRTGNNFTFSYTFEDVPFHSSYAHSQSLDRLMNPLIDQYLYYLNRTQNQSGSAQDKALLFSRGSPAGMSVQPKNWLPGPCYRQQRVSKTKTDNNNSNFTWTGASKYNLNGRESIINPGTAMASHKDDKDKFFPMSGVMIFGKESAGASNTALDNVMITDEEEIKATNPVATERFGTVAVNFQSSSTDPATGDVHVMGALPGMVWQDRDVYLQGPIWAKIPHTDGHFHPSPLMGGFGLKHPPPQILIKNTPVPANPPAEFSATKFASFITQYSTGQVSVEIEWELQKENSKRWNPEVQYTSNYAKSANVDFTVDNNGLYTEPRPIGTRYLTRP

SEQ ID NO: 164 - protein, 740 aa, Adeno-associated virus 2
MAADGYLPDWLEDTLSEGIRQWWKLKPGPPPPKPAERHKDDSRGLVLPGYKYLGPFNGLDKGEPVNAADAAALEHDKAYDRQLDSGDNPYLKYNHADAEFQERLKEDTSFGGNLGRAVFQAKKRVLEPLGLVEEPVKTAPGKKRPVEHSPVEPDSSSGTGKAGQQPARKRLNFGQTGDADSVPDPQPLGQPPAAPSGLGTNTMATGSGAPMADNNEGADGVGNSSGNWHCDSTWMGDRVITTSTRTWALPTYNNHLYKQISSQSGASNDNHYFGYSTPWGYFDFNRFHCHFSPRDWQRLINNNWGFRPKRLNFKLFNIQVKEVTQNDGTTTIANNLTSTVQVFTDSEYQLPYVLGSAHQGCLPPFPADVFMVPQYGYLTLNNGSQAVGRSSFYCLEYFPSQMLRTGNNFTFSYTFEDVPFHSSYAHSQSLDRLMNPLIDQYLYYLSRTNTPSGTTTQSGLQFSQAGASDIRDQSRNWLPGPCYRQQRVSKTSADNNNSEYSWTGATKYHLNGRDSLVNPGPAMASHKDDEEKFFPQSGVLIFGKQGSEKTNVDIEKVMITDEEEIRTTNPVATEQYGSVSTNLQRGNRQAATADVNTQGVLPGMVWQDRDVYLQGPIWAKIPHTDGHFHPSPLMGGFGLKHPPPQILIKNTPVPANPSTTFSAAKFASFITQYSTGQVSVEIEWELQKENSKRWNPEIQYTSNYNKSVNVDFTVDTNGVYSEPRPIGTRYLTRNLLLAAA

SEQ ID NO: 165 - protein, 734 aa, Adeno-associated virus 2
MAADGYLPDWLEDTLSEGIRQWWKLKPGPPPPKPAERHKDDSRGLVLPGYKYLGPFNGLDKGEPVNEADAAALEHDKAYDRQLDSGDNPYLKYNHADAEFQERLKEDTSFGGNLGRAVFQAKKRVLEPLGLVEEPVKTAPGKKRPVEHSPVEPDSSSGTGKAGQQPARKRLNFGQTGDADSVPDPQPLGQPPAAPSGLGTNTMATGSGAPMADNNEGADGVGNSSGNWHCDSTWMGDRVITTSTRTWALPTYNNHLYKQISSQSGASNDNHYFGYSTPWGYFDFNRFHCHFSPRDWQRLINNNWGFRPKRLNFKLFNIQVKEVTQNDGTTTIANNLTSTVQVFTDSEYQLPYVLGSAHQGCLPPFPADVFMVPQYGYLTLNNGSQAVGRSSFYCLEYFPSQMLRTGNNFTFSYTFEDVPFHSSYAHSQSLDRLMNPLIDQYLYYLSRTNTPSGTTTQSGLQFSQAGASDIRDQSRNWLPGPCYRQQRVSKTSADNNNSEYSWTGATMYHLNGRDSLVNPGPAMASHKDDEEKFFPQSGVLIFGKQGSEKTNVDIEKVMITDEEEIRTTNPVATEQYGSVSTNLQRGNRQAATADVNTQGVLPGMVWQDRDVYLQGPIWAKIPHTDGHFHPSPLMGGFGLKHPPPQILIKNTPVPANPSTTFSAAKFASFITQYSTGQVSVEIEWELQKENSKRWNPEIQYTSNYNKSINVDFTVDTNGVYSEPRPIGTRYLTRN

SEQ ID NO: 166 - protein, 734 aa, Adeno-associated virus 2
MAADGYLPDWLEDTLSEGIRQWWKLKPGPPPPKPAERHKDDSRGLVLPGYKYLGPFNGLDKGEPVNEADAAALEHDKAYDRQLDSGDNPYLKYNHADAEFQERLKEDTSFGGNLGRAVFQAKKRVLEPLGLVEEPVKTAPGKKRPVEHSPVEPDSSSGTGKAGQQPARKRLNFGQTGDADSVPDPQPLGQPPAAPSGLGTNTMATGSGAPMADNNEGADGVGNSSGNWHCDSTWMGDRVITTSTRTWALPTYNNHLYKQISSQSGASNDNHYFGYSTPWGYFDFNRFHCHFSPRDWQRLINNNWGFRPKRLNFKLFNIQVKEVTQNDGTTTIANNLTSTVQVFTDSEYQLPYVLGSAHQGCLPPFPADVFMVPQYGYLTLNNGSQAVGRSSFYCLEYFPSQMLRTGNNFTFSYTFEDVPFHSSYAHSQSLDRLMNPLIDQYLYYLSRTNTPSGTTTQSGLQFSQAGASDIRDQSRNWLPGPCYRQQRVSKTSADNNNSEYSWTGATKYHLNGRDSLVNPGPAMASHKDDEEKFFPQSGVLIFGKQGSEKTNVDIEKVMITDEEEIRTTNPVATEQYGSVSTNLQRGNRQAATADVNTQGVLPGMVWQDRDVYLQGPIWAKIPHTDGHFHPSPLMGGFGLKHPPPQILIKNTPVPANPSTTFSEAKFASFITQYSTGQVSVEIEWELQKENSKRWNPEIQYTSNYNKSVNVDFTVDTNGVYSEPRPIGTRYLTRN

SEQ ID NO: 167 - protein, 739 aa, Adeno-associated virus 2
MAADGYLPDWLEDTLSEGIRQWWKLKPGPPPPKPAERHKDDSRGLVLPGYKYLGPFNGLDKGEPVNEADAAALEHDKAYDRQLDSGDNPYLKYNHADAEFQERLKEDTSFGGNLGRAVFQAKKRVLEPLGLVEEPVKTAPGKKRPVEHSPVEPDSSSGTGKAGQQPARKRLNFGQTGDADSVPDPQPLGQPPAAPSGLGTNTMATGSGAPMADNNEGADGVGNSSGNWHCDSTWMGDRVITTSTRTWALPTYNNHLYKQISSQSGASNDNHYFGYSTPWGYFDFNRFHCHFSPRDWQRLINNNWGFRPKRLNFKLFNIQVKEVTQNDGTTTIANNLTSTVQVFTDSEYQLPYVLGSAHQGCLPPFPADVFMVPQYGYLTLNNGSQAVGRSSFYCLEYFPSQMLRTGNNFTFSYTFEDVPFHSSYAHSQSLDRLMNPLIDQYLYYLSRTNTPSGTTTQSGLQFSQAGASDIRDQSRNWLPGPCYRQQRVSKTSADNNNSEYSWTGATKYHLNGRDSLVNPGPAMASHKDDEEKFFPQSGVLIFGKQGSEKTNVDIEKVMITDEEEIRTTNPVATEQYGSVSTNLQRGNRQAATADVNTQGVLPGMVWQDRDVYLQGPIWAKIPHTDGHFHPSPLMGGFGLKHPPPQILIKNTPVPANPSTTFSAAKFASFITQYSTGQVSVEIEWELQKENSKRWNPEIQYTSNYNKSVNVDFTVDTNGVYSEPRPIGTRYLTRNLLLAA

SEQ ID NO: 168 - protein, 725 aa, Adeno-associated virus 2
MAADGYLPDWLEDTLSEGIRQWWKLKPGPPPPKPAERHKDDSRGLVLPGYKYLGPFNGLDKGEPVNEADAAALEHDKAYDRQLDSGDNPYLKYNHADAEFQERLKEDTSFGGNLGRAVFQAKKRVLEPLGLVEEPVKTAPGKKRPVEHSPVEPDSSSGTGKAGQQPARKRLNFGQTGDADSVPDPQPLGQPPAAPSGLGTNTMATGSGAPMADNNEGADGVGNSSGNWHCDSTWMGDRVITTSTRTWALPTYNNHLYKQISSQSGASNDNHYFGYSTPWGYFDFNRFHCHFSPRDWQRLINNNWGFRPKRLNFKLFNIQVKEVTQNDGTTTIANNLTSTVQVFTDSEYQLPYVLGSAHQGCLPPFPADVFMVPQYGYLTLNNGSQAVGRSSFYCLEYFPSQMLRTGNNFTFSYTFEDVPFHSSYAHSQSLDRLMNPLIDQYLYYLSRTNTPSGTTTQSGLQFSQAGASDIRDQSRNWLPGPCYRQQRVSKTSADNNNSEYSWTGATKYHLNGRDSLVNPGPAMASHKDDEEKFFPQSGVLIFGKQGSEKTNVDIEKVMITDEEEIRTTNPVATEQYGSVSTNLQRGNRQAATADVNTQGVLPGMVWQDRDVYLQGPIWAKIPHTDGHFHPSPLMGGFGLKHPPPQILIKNTPVPANPSTTFSAAKFASFITQYSTGQVSVEIEWELQKENSKRWNPEIQYTSNYNKSVNVDFTVDTNGVYSEPRP

SEQ ID NO: 169 - protein, 707 aa, Adeno-associated virus 2
MAADGYLPDWLEDTLSEGIRQWWKLKPGPPPPKPAERHKDDSRGLVLPGYKYLGPFNGLDKGEPVNEADAAALEHDKAYDRQLDSGDNPYLKYNHADAEFQERLKEDTSFGGNLGRAVFQAKKRVLEPLGLVEEPVKTAPGKKRPVEHSPVEPDSSSGTGKAGQQPARKRLNFGQTGDADSVPDPQPLGQPPAAPSGLGTNTMATGSGAPMADNNEGADGVGNSSGNWHCDSTWMGDRVITTSTRTWALPTYNNHLYKQISSQSGASNDNHYFGYSTPWGYFDFNRFHCHFSPRDWQRLINNNWGFRPKRLNFKLFNIQVKEVTQNDGTTTIANNLTSTVQVFTDSEYQLPYVLGSAHQGCLPPFPADVFMVPQYGYLTLNNGSQAVGRSSFYCLEYFPSQMLRTGNNFTFSYTFEDVPFHSSYAHSQSLDRLMNPLIDQYLYYLSRTNTPSGTTTQSGLQFSQAGASDIRDQSRNWLPGPCYRQQRVSKTSADNNNSEYSWTGATKYHLNGRDSLVNPGPAMASHKDDEEKFFPQSGVLIFGKQGSEKTNVDIEKVMITDEEEIRTTNPVATEQYGSCIYQPPERQQTSSYRRCQHTRRSSRHGLAGQRCVPSGAHLGKDSTHGRTFSPLSPHGWIRTTPSSTDSHQEHPGTCESFDHLQCGKVCFLHHTVLHGTGQRGDRVRAAEGKQQTLESRNSVHFQLQQVC

SEQ ID NO: 170 - protein, 739 aa, Adeno-associated virus 2; identical to SEQ ID NO: 167

SEQ ID NO: 171 - protein, 737 aa, Adeno-associated virus 2
MASDGYLPDWLEDNLSEGIREWWDLKPGAPKPKANQQKQDDGRGLVLPGYKYLGPFNGLDKGEPVNAADAAALEHDKAYDQQLKAGDNPYLRYNHADAEFQERLQEDTSFGGNLGRAVFQAKKRVLEPFGLVEEGAKTAPGKKRPVEQSPQEPDSSSGIGKTGQQPAKKRLNFGQTGDSESVPDPQPLGEPPATPAAVGPTTMASGGGAPMADNNEGADGVGNASGNWHCDSTWLGDRVITTSTRTWALPTYNNHLYKQISSASTGASNDNHYFGYSTPWGYFDFNRFHCHFSPRDWQRLINNNWGFRPKRLNFKLFNIQVKEVTTNDGTTTIANNLTSTVQVFTDSEYQLPYVLGSAHQGCLPPFPADVFMVPQYGYLTLNNGSQAVGRSSFYCLEYFPSQMLRTGNNFTFSYTFEDVPFHSSYAHSQSLDRLMNPLIDQYLYYLSRTNTPSGTTTQSGLQFSQAGASDIRDQSRNWLPGPCYRQQRVSKTSADNNNSEYSWTGATKYHLNGRDSLVNPGPAMASHKDDEEKFFPQSGVLIFGKQGSEKTNVDIEKVMITDEEEIRTTNPVATEQYGSVSTNLQRGNRQAATADVNTQGVLPGMVWQDRDVYLQGPIWAKIPHTDGHFHPSPLMGGFGLKHHPPQILIKNTPVPANPSTTFSAAKFASFITQYSTGQVSVEIEWELQKENSKRWNPEIQYTSNYNKSVNVDFTVDTNGVYSEPRPIGTRYLTRNLL

SEQ ID NO: 172 - protein, 741 aa, Adeno-associated virus 2
MAADGYLPDWLEDTLSEGIREWWALKPGAPKPKANQQKQDDGRGLVLPGYKYLGPFNGLDKGEPVNEADAAALEHDKAYDQQLQAGDNPYLRYNHADAEFQERLQEDTSFGGNLGRAVFQAKKRVLEPLGLVEEPVKTAPGKKRPVEHSPVEPDSSSGTGKSGQQPARKRLNFGQTGDADSVPDPQPLGQPPAAPSGLGTNTMATGSGAPMADNNEGADGVGNSSGNWHCDSTWMGDRVITTSTRTWALPTYNNHLYKQISSQSGASNDNHYFGYSTPWGYFDFNRFHCHFSPRDWQRLINNNWGFRPKRLNFKLFNIQVKEVTQNDGTTTIANNLTSTVQVFTDSEYQLPYVLGSAHQGCLPPFPADVFMVPQYGYLTLNNGSQAVGRSSFYCLEYFPSQMLRTGNNFTFSYTFEDVPFHSSYAHSQSLDRLMNPLIDQYLYYLSRTNTPSGTTTQSGLQFSQAGASDIRDQSRNWLPGPCYRQQRVSKTSADNNNSEYSWTGATKYHLNGRDSLVNPGPAMASHKDDEEKFFPQSGVLIFGKQGSEKTNVDIEKVMITDEEEIRTTNPVATEQYGSVSTNLQRGNLANHNNTTNARQAATADVNTQGVLPGMVWQDRDVYLQGPIWAKIPHTDGHFHPSPLMGGFGLKHPPPQILIKNTPVPANPSTTFSAAKFASFITQYSTGQVSVEIEWELQKENSKRWNPEIQYTSNYNKSINVDFTVDTNGVYSEPRPIGTRYL

SEQ ID NO: 173 - protein, 730 aa, Adeno-associated virus 2
MASDGYLPDWLEDNLSEGIREWWDLKPGAPKPKANQQKQDDGRGLVLPGYKYLGPFNGLDKGEPVNAADAAALEHDKAYDQQLKAGDNPYLRYNHADAEFQERLQEDTSFGGNLGRAVFQAKKRVLEPFGLVEEGAKTAPGKKRPVEQSPQEPDSSSGIGKTGQQPAKKRLNFGQTGDSESVPDPQPLGEPPATPAAVGPTTMASGGGAPMADNNEGADGVGNASGNWHCDSTWLGDRVITTSTRTWALPTYNNHLYKQISSASTGASNDNHYFGYSTPWGYFDFNRFHCHFSPRDWQRLINNNWGFRPKRLNFKLFNIQVKEVTTNDGVTTIANNLTSTVQVFSDSEYQLPYVLGSAHQGCLPPFPADVFMIPQYGYLTLNNGSQAVGRSSFYCLEYFPSQMLRTGNNFTFSYTFEDVPFHSSYAHSQSLDRLMNPLIDQYLYYLNRTQNQSGSAQNNDLLFSRGSPAGMSVQPKNWLPGPCYRQQRVSKTKTDNNNSNFTWTGASKYNLNGRESIINPGTAMASHKDDKDKFFPMSGVMIFGKESAGASNTALDNVMITDEEEIKATNPVATERFGTVAVNLQSSSTDPATGDVHVMGALPGMVWQDRDVYLQGPIWAKIPHTDGHFHPSPLMGGFGLKNPPPQILIKNTPVPANPPAEFSATKFASFITQYSTGQVSVEIEWELQKENSKRWNPEVQYTSNYAKSANVDFTVDNNGLYTEPRPIGTR

SEQ ID NO: 174 - protein, 735 aa, Adeno-associated virus 2
  misc_feature (239)..(239): Xaa can be any naturally occurring amino acid
MASDGYLPDWLEDNLSEGIREWWDLKPGAPKPKANQQKQDDGRGLVLPGYKYLGPFNGLDKGEPVNAADAAALEHDKAYDQQLKAGDNPYLRYNHADAEFQERLQEDTSFGGNLGRAVFQAKKRVLEPFGLVEEGAKTAPGKKRPVEQSPQEPDSSSGIGKTGQQPAKKRLNFGQTGDSESVPDPQPLGEPPATPAAVGPTTMASGGGAPMADNNEGADGVGNASGNWHCDSTWLGDRXITTSTRTWALPTYNNHLYKQISSASTGASNDNHYFGYSTPWGYFDFNRFHCHFSPRDWQRLINNNWGFRPKRLNFKLFNIQVKEVTTNDGVTTIANNLTSTVQVFSDSEYQLPYVLGSAHQGCLPPFPADVFMIPQYGYLTLNNGSQAVGRSSFYCLEYFPSQMLRTGNNFTFSYTFEDVPFHSSYAHSQSLDRLMNPLIDQYLYYLNRTQNQSGSAQNNDLLFSRGSPAGMSVQPKNWLPGPCYRQQRVSKTKTDNNNSNFTWTGASKYNLNGRESIINPGTAMASHKDDKDKFFPMSGVMIFGKESAGASNTALDNVMITDEEEIKATNPVATERFGTVAVNLQSSSTDPATGDVHVMGALPGMVWQDRDVYLQGPIWAKIPHTDGHFHPSPLMGGFGLKNPPPQILIKNTPVPANPPAEFSATKFASFITQYSTGQVSVEIEWELQKENSKRWNPEVQYTSNYAKSANVDFTVDNNGLYTEPRPIGTRYLTRP

SEQ ID NO: 175 - protein, 733 aa, Adeno-associated virus 2
MASDGYLPDWLEDNLSEGIREWWDLKPGAPKPKANQQKQDDGRGLVLPGYKYLGPFNGLDKGEPVNAADAAALEHDKAYDQQLKAGDNPYLRYNHADAEFQERLQEDTSFGGNLGRAVFLAKKRVLEPFGLVEEGAKTAPGKKRPVEQSPQEPDSSSGIGKTGQQPAKKRLNFGQTGDSESVPDPQPLGEPPATPAAVGPTTMASGGGAPMADNNEGADGVGNASGNWHCDSTWLGDRVITTSTRTWALPTYNNHLYKQISSASTGASNDNHYFGYSTPWGYFDFNRFHCHFSPRDWQRLINNNWGFRPKRLNFKLFNIQVKEVTTNDGVTTIANNLTSTVQVFSDSEYQLPYVLGSAHQGCLPPFPADVFMIPQYGYLTLNNGSQAVGRSSFYCLEYFPSQMLRTGNNFTFSYTFEDVPFHSSYAHSQSLDRLMNPLIDQYLYYLNRTQNQSGSAQNNDLLFSRGSPAGMSVQPKNWLPGPCYRQQRVSKTKTDNNNSNFTWTGASKYNLNGRESIINPGTAMASHKDDKDKFFPMSGVMIFGKESAGASNTALDNVMITDEEEIKATNPVATERFGTVAVNLQSSSTDPATGDVHVMGALPGMVWQDRDVYLQGPIWAKIPHTDGHFHPSPLMGGFGLKNPPPQILIKNTPVPANPPAEFSATKFASFITQYSTGQVSVEIEWELQKENSKRWNPEVQYTSNYAKSANVDFTVDNNGLYTEPRPIGTRYLT

SEQ ID NO: 176 - protein, 734 aa, Adeno-associated virus 2
MAADGYLPDWLEDTLSEGIRQWWKLKPGPPPPKPAERHKDDSRGLVLPGCKYLGPFNGLDKGEPVNEADAAALEHDKAYDRQLDSGDNPYLKYNHADAEFQERLKEDTSFGGNLGRAVFQAKKRVLEPLGLVEEPVKTAPGKKRPVEHSPVEPDSSSGTGKAGQQPARKRLNFGQTGDADSVPDPQPLGQPPAAPSGLGTNTMATGSGAPMADNNEGADGVGNSSGNWHCDSTWMGDRVITTSTRTWALPTYNNHLYKQISSQSGASNDNHYFGYSTPWGYFDFNRFHCHFSPRDWQRLINNNWGFRPKRLNFKLFNIQVKEVTQNDGTTTIANNLTSTVQVFSDSEYQLPYVLGSAHQGCLPPFPADVFMIPQYGYLTLNNGSQAVGRSSFYCLEYFPSQMLRTGNNFTFNYTFEDVPFHSSYAHSQSLDRLMNPLIDQYLYYLNRTQNQSGSAQNNDLLFSRGSPAGMSVQPKNWLPGPCYRQQRVSKTKTDNNNSNFTWTGASKYNLNGRESIINPGTAMASHKDDKDKFFPMSGVMIFGKESAGASNTALDNVMITDEEEIKATNPVATERFGTVAVNLQSSSTDPATGDVHVMGALPGMVWQDRDVYLQGPIWAKIPHTDGHFHPSPLMGGFGLKNPPPQILIKNTPVPANPPAEFSATKFASFITQYSTGQVSVEIEWELQKENSKRWNPEVQYTSNYAKSANVDFTVDNNGLYTEPRPIGTRYLTRP

SEQ ID NO: 177 - protein, 734 aa, Adeno-associated virus 2
MAADGYLPDWLEDTLSEGIRQWWKLKPGPPPPKPAERHKDDSRGLVLPGYKYLGPFNGLDKGEPVNEADAAALEHDKAYDRQLDSGDNPYLKYNHADAEFQERLKEDTSFGGNLGRAVFQAKKRVLEPLGLVEEPVKTAPGKKRPVEHSPVEPDSSSGTGKAGQQPARKRLNFGQTGDADSVPDPQPLGQPPAAPSGLGTNTMATGSGAPMADNNEGADGVGNSSGNWHCDSTWMGDRVITTSTRTWALSTYNNHLYKQISSQSGASNDNHYFGYSTPWGYFDFNRFHCHFSPRDWQRLINNNWGFRPKRLNFKLFNIQVKEVTQNDGTTTIANNLTSTVQVFTDSEYQLPYVLGSAHQGCLPPFPADVFMVPQYGYLTLNNGSQAVGRSSFYCLEYFPSQMLRTGNNFTFSYTFEDVPFHSSYAHSQSLDRLMNPLIDQYLYYLSRTNTPSGTTTQSRLQFSQAGASDIRDQSRNWLPGPCYRQQRVSKTSADNNNSEYSWTGATKYHLNGRDSLVNPGPAMASHKDDEEKFFPQSGVLIFGKQGSEKTNVDIEKVMITDEEEIRTTNPVATEQYGSVSTNLQRGNRQAATADVNTQGVLPGMVWQDRDVYLQGPIWAKIPHTDGHFHPSPLMGGFGLKHPPPQILIKNTPVPANPSTTFSAAKFASFITQYSTGQVSVEIEWELQKENSKRWNPEIQYTSNYNKSINVDFTVDTNGVYSEPRPIGTRYLTRN

SEQ ID NO: 178 - protein, 738 aa, Adeno-associated virus 2
MAADGYLPDWLEDTLSEGIRQWWKLKPGPPPPKPAERHKDDSRGLVLPGYKYLGPFNGLDKGEPVNEADAAALEHDKAYDRQLDGGDNPYLKYNHADAEFQERLKEDTSFGGNLGRAVFQAKKRVLEPLGLVEEPVKTAPGKKRPVEHSPVEPDSSSGTGKAGQQPARKRLNFGQTGDADSVPDPQPLGQPPAAPSGLGTNTMATGSGAPMADNNEGADGVGNSSGNWHCDSTWMGDRVITTSTRTWALPTYNNHLYKQISSQSGASNDNHYFGYSTPWGYFDFNRFHCHFSPRDWQRLINNNWGFRPKRLNFKLFNIQVKEVTQNDGTTTIANNLTSTVQVFTDSEYQLPYVLGSAHQGCLPPFPADVFMVPQYGYLTLNNGSQAVGRSSFYCLEYFPSQMLRTGNNFTFSYTFEDVPFHSSYAHSQSLDRLMNPLIDQYLYYLSRTNTPSGTTTQSGLQFSQAGASDIRDQSRNWLPGPCYRQQRVSKTSADNNNSEYSWTGATKYHLNGRDSLVNPGPAMASHKDDEEKFFPQSGVLIFGKQGSEKTNVDIEKVMITDEEEIRTTNPVATEQYGSVSTNLQRGNRQAATADVNTQGVLPGMVWQDRDVYLQGPIWAKIPHTDGHFHPSPLMGGFGLKHPPPQILIKNTPVPANPSTTFSAAKFASFITQYSTGQVSVEIEWELQKENSKRWNPEIQYTSNYNKSVNVDFTVDTNGVYSEPRPIGTRYLTRNLLRP

SEQ ID NO: 179 - DNA, 2208 bp, Adeno-associated virus
atggctgccgatggttatcttccagattggctcgaggacactctctctgaaggaataagacagtggtggaagctcaaacctggcccaccaccaccaaagcccgcagagcggcataaggacgacagcaggggtcttgtgcttcctgggtacaagtacctcggacccttcaacggactcgacaagggggagccggtcaacgaggcagacgccgcggccctcgagcacgacaaggcctacgaccggcagctcgacagcggagacaacccgtacctcaagtacaaccacgccgacgcagagtttcaggagcgccttaaagaagatacgtcttttgggggcaacctcggacgagcagtcttccaggcgaaaaagagggttcttgaacctctgggcctggttgaggaacctgttaagacggctccgggaaaaaagaggccggtagagcactctcctgtggagccagactcctcctcgggaaccggaaaagcgggccagcagcctgcaagaaaaagattaaattttggtcagactggagacgcagactccgtacctgacccccagcctctcggacagccaccagcagccccctctggtctgggatctactacaatggctacaggcagtggcgcaccaatggcagacaataacgagggtgccgatggagtgggtaattcctcaggaaattggcattgcgattcccaatggctgggcgacagagtcatcaccaccagcacccgaacctgggccctgcccacatacaacaaccacctctacaagcaaatctccagccaatcaggagccagcaacgacaaccactactttggctacagcaccccctgggggtattttgacttcaacagattccactgccacttttcaccacgtgactggcaaagactcatcaacaacaactggggattccggcccaaaagactcaacttcaagctctttaatattcaagtcaaagaggtcacgcagaatggcggtacgacgacgattgccaataaccttaccagcacggttcaggtgtttactgactcggagtaccagctcccgtacgtcctgggctcggcgcatcaaggatgcctcccgccgtttccagcggacgtcttcatggtcccacagtatggatacctcaccctgaacaacgggagtcaggcggtaggacgctcttccttttactgcctggagtactttccttctcagatgctgcgtactggaaacaactttcagttcagctacacttttgaagacgtgcctttccacagcagctacgctcacagccagagtctggatcggctgatgaatcctctgatcgaccagtacctgtattatctgaacaagacacaaacaaatagtggaactcttcagcagtctcggctactgtttagccaagctggaccaaccaacatgtctcttcaagctaaaaactggctgcctggaccttgctacagacagcagcgtctgtcaaaacaggcaaacggcaacaacaacagcaactttccctggactgcagctacaaagtatcatctaaatggccgggactcgttggttaatccaggaccagctatggccagtcacaaggatgacgaagaaaagtttttccccatgcatggaaccctgatatttggtaaacaaggaacaaatgccaacgacgcggatttggaaaatgtcatgattacagatgaagaagaaatcagggccaccaatcccgtggctacggagcagtacgggactgtgtcaaataatttgcaaaactcaaacactggtccaactactggaactgtcaatcaccaaggagcgttacctggtatggtgtggcaggatcgagacgtgtacctgcagggacccatttgggccaagattcctcacaccgatggacactttcatccttctccactgacgggaggttttggactcaaacacccgcctcctcagatcatgatcaaaaacactcccgttccagccaatcctcccacaaacttcagttctgccaagtttgcttctttcatcacacagtattccacgggacaggtcagcgtggagatcgagtgggagctgcagaaggagaacagcaaacgctggaatcccgaaattcagtacacttccaactacaacaagtctgttaatgtggactttactgtggacactaatggtgtgtattcagagcctcgccccattggcaccagatacctgactcgtaatctgtaa

SEQ ID NO: 180 - protein, 735 aa, Adeno-associated virus
MAADGYLPDWLEDTLSEGIRQWWKLKPGPPPPKPAERHKDDSRGLVLPGYKYLGPFNGLDKGEPVNEADAAALEHDKAYDRQLDSGDNPYLKYNHADAEFQERLKEDTSFGGNLGRAVFQAKKRVLEPLGLVEEPVKTAPGKKRPVEHSPVEPDSSSGTGKAGQQPARKRLNFGQTGDADSVPDPQPLGQPPAAPSGLGSTTMATGSGAPMADNNEGADGVGNSSGNWHCDSQWLGDRVITTSTRTWALPTYNNHLYKQISSQSGASNDNHYFGYSTPWGYFDFNRFHCHFSPRDWQRLINNNWGFRPKRLNFKLFNIQVKEVTQNGGTTTIANNLTSTVQVFTDSEYQLPYVLGSAHQGCLPPFPADVFMVPQYGYLTLNNGSQAVGRSSFYCLEYFPSQMLRTGNNFQFSYTFEDVPFHSSYAHSQSLDRLMNPLIDQYLYYLNKTQTNSGTLQQSRLLFSQAGPTNMSLQAKNWLPGPCYRQQRLSKQANGNNNSNFPWTAATKYHLNGRDSLVNPGPAMASHKDDEEKFFPMHGTLIFGKQGTNANDADLENVMITDEEEIRATNPVATEQYGTVSNNLQNSNTGPTTGTVNHQGALPGMVWQDRDVYLQGPIWAKIPHTDGHFHPSPLTGGFGLKHPPPQIMIKNTPVPANPPTNFSSAKFASFITQYSTGQVSVEIEWELQKENSKRWNPEIQYTSNYNKSVNVDFTVDTNGVYSEPRPIGTRYLTRNL

SEQ ID NO: 181 - DNA, 2208 bp, Adeno-associated virus
atggctgccgatggttatcttccagattggctcgaggacactctctctgaaggaataagacagtggtggaagctcaaacctggcccaccaccaccaaagctcgcagagcggcatcaggacgacagcaggggtcttgtgcttcctgggtacaagtacctcggacccttcaacggactcgacaaaggagagccggtcaacgaggcagacgccgcggccctcgagcacgacaaggcctacgaccggcagctcgacagcggagacaacccgtacctcaagtacaaccacgccgacgcggagtttcaggagcgtcttaaagaagatacgtcttttgggggcaacctcggacgagcagtcttccaggcgaaaaagagggttcttgaacctctgggcctggttgaggaacctgttaagacggctccgggaaaaaagaggccggtagagcactctcctgtggagccagactcctcctcgggaaccggaaaggcgggccatcagcctgcgagaaagagattgaattttggtcagactggagacgcagactccgtacctgacccccagcctctcggacagccaccagcagcccccacaagtctgggatctactacaatggctacaggcagtggcgcaccaatggcagacaataacgagggtgccgatggagtgggtaattcctcaggaaattggcattgcgattcccaatggctgggcgacagagtcatcaccaccagcacccgaacctgggccctgcccacctacaacaaccacctctacaagcaaatctccagccaatcaggagcctcgaacgacaaccactactttggctacagcaccccctgggggtattttgacttcaacagattccactgtcacttctccccacgtgattggcaaagactcatcaacaacaactggggattccgacccaagagactcaacttcaagctctttaacattcaagtcaaagaggtcacgcagaatgacggtacgacgacgattgccaataaccttaccagcacggttcaggtgtttactgactcggagtaccagctcccgtacgtcctcggctcggcgcatcaaggatgcctcccgccgtttccagcggacgtcttcacggtcccacagtatggatacctcaccctgaacaacgggagtcaggcggtaggacgctcttccttttactgcctggagtactttccttctcagatgctgcgtactggaaacaaccttaccttcagctacacctttgaggacgttcctttccacagcagctacgctcacagccagagtttggaccggctgatgaatcctctgatcgaccagtatctatattatctgaacaggacacaatcaaatagtggaactcttcagcagtctaggctactgtttagccaagctggacccaccagcatgtctcttcaagctaaaaactggctgcctggaccttgctacagacagcagcgtctttcaaagcaggcaaacgacaacaacaacagcaactttccctggactgcggctacaaagtatcatctaaatggccgggactcgttggttaatccaggaccagctatggccagccacaaagacgatgaagaaaagtttttccccatgcatggaaccctgatatttggtaaacaaggaacaaatgctaacgacgcggatttggagcatgttatgattacagatgaagaagaaatcaggaccaccaatcctgtggctacagagcagtacggaaacgtgtcaaataatttgcaaaactcaaatactggtccaactacagaaaatgtcaatcaccagggagcgttacctggtatggtgtggcaggatcgagacgtgtacctgcagggacccatttgggccaagattcctcacaccgacggacactttcacccttctccactgatgggaggttttggactcaaacacccgcctcctcaaatcatgatcaaaaacactcccgttccagccaatcctcccacaaactacagttctgccaagtttgcttctttcatcacacagtattccacgggccaggtcagcgtggagattgagtgggagctgcggaaggagaacagcaaacgctggaaccccgagatccagtatacttccaactacaacaaatctgttaatgtggactttactgtggacactaatggtgtgtattcagagcctcgccccattggcaccagatacctgactcgtaatctgtaa

SEQ ID NO: 182 - protein, 735 aa, Adeno-associated virus
MAADGYLPDWLEDTLSEGIRQWWKLKPGPPPPKLAERHQDDSRGLVLPGYKYLGPFNGLDKGEPVNEADAAALEHDKAYDRQLDSGDNPYLKYNHADAEFQERLKEDTSFGGNLGRAVFQAKKRVLEPLGLVEEPVKTAPGKKRPVEHSPVEPDSSSGTGKAGHQPARKRLNFGQTGDADSVPDPQPLGQPPAAPTSLGSTTMATGSGAPMADNNEGADGVGNSSGNWHCDSQWLGDRVITTSTRTWALPTYNNHLYKQISSQSGASNDNHYFGYSTPWGYFDFNRFHCHFSPRDWQRLINNNWGFRPKRLNFKLFNIQVKEVTQNDGTTTIANNLTSTVQVFTDSEYQLPYVLGSAHQGCLPPFPADVFTVPQYGYLTLNNGSQAVGRSSFYCLEYFPSQMLRTGNNLTFSYTFEDVPFHSSYAHSQSLDRLMNPLIDQYLYYLNRTQSNSGTLQQSRLLFSQAGPTSMSLQAKNWLPGPCYRQQRLSKQANDNNNSNFPWTAATKYHLNGRDSLVNPGPAMASHKDDEEKFFPMHGTLIFGKQGTNANDADLEHVMITDEEEIRTTNPVATEQYGNVSNNLQNSNTGPTTENVNHQGALPGMVWQDRDVYLQGPIWAKIPHTDGHFHPSPLMGGFGLKHPPPQIMIKNTPVPANPPTNYSSAKFASFITQYSTGQVSVEIEWELRKENSKRWNPEIQYTSNYNKSVNVDFTVDTNGVYSEPRPIGTRYLTRNL

SEQ ID NO: 183 - DNA, 2208 bp, Adeno-associated virus
atggctgccgatggttatcttccagattggctcgaggacactctctctgaaggaataagacagtggtggaagctcaaacctggcccaccaccaccaaagcccgcagagcggcatcaggacgacagcaggggtcttgtgcttcctgggtacaagtacctcggacccttcaacggactcgacaaaggagagccggtcaacgaggcagacgccgcggccctcgagcacgacaaggcctacgaccggcagctcgacagcggagacaacccgtacctcaagtacaaccacgccgacgcggagtttcaggagcgtcttaaagaagatacgtcttttgggggcaacctcggacgagcagtcttccaggcgaaaaagagggttcttgaacctctgggcctggttgaggaacctgttaagacggctccgggaaaaaagaggccggtagagcactctcctgtggagccagactcctcctcgggaaccggaaaagcgggccatcagcctgcgagaaagagattgaattttggtcagactggagacgcagactccgtacctgacccccagcctctcggacagccaccagcagcccccacaagtttgggatctactacaatggctacaggcagtggcgcaccaatggcagacaataacgagggtgccgatggagtgggtaattcctcaggaaattggcattgcgattcccaatggctgggcgacagagtcatcaccaccagcacccgaacctgggccctgcccacctacaacaaccacctctacaagcaaatctccagccaatcaggagcctcgaacgacaaccactactttggctacagcaccccctgggggtattttgacttcaacagattccactgtcacttctccccacgtgattggcaaagactcatcaacaacaactggggattccgacccaagagactcaacttcaagctctttaacattcaagtcaaggaggtcacgcagaatgacggtacgacgacgattgccaataaccttaccagcacggttcaggtgtttactgactcggagtaccagctcccgtacgtcctcggctcggcgcatcaaggatgcctcccgccgtttccagcggacgtcttcatggtcccacagtatggatacctcaccctgaacaacgggagtcaggcggtaggacgctcttccttttactgcctggagtactttccttctcagatgctgcgtactggaaacaactttaccttcagctacacctttgaggacgttcctttccacagcagctacgctcacagccagagtttggaccggctgatgaatcctctgatcgaccagtatctatattatctgaacaggacacaatcaaatagtggaactcttcagcagtctaggctactgtttagccaagctggacccaccagcatgtctcttcaagctaaaaactggctgcctggaccttgctacagacagcagcgtctttcaaagcaggcaaacgacaacaacaacagcaactttccctggactgcggctacaaagtatcgtctaaatggccgggactcgttggttaatccaggaccagctatggccagccacaaagacgatgaagaaaagtttttccccatgcatggaaccctgatatttggtaaacaaggaacaaatgctaacgacgcggatttggagcatgttatgattacagatgaagaagaaatcaggaccaccaatcctgtggctacagagcagtacggaaacgtgtcaaataatttgcaaaactcaaatactggtccaactacagaaaatgtcaatcaccagggagcgttacctggtatggtgtggcaggatcgagacgtgtacctgcagggacccatttgggccaagattcctcacaccgacggacactttcacccttctccactgatgggaggttttggactcaaacacccgcctcctcaaatcatgatcaaaaacactcccgttccagccaatcctcccacaaacttcagttctgccaagtttgcttctttcatcacacagtattccacgggccaggtcagcgtggagattgagtgggagctgcagaaggagaacagcaaacgctggaaccccgagatccagtatacttccaactacaacaaatctgttaatgtggactttactgtggacactaatggtgtgtattcagagcctcgccccattggcaccagatacctgactcgtaatctgtaa

SEQ ID NO: 184 - protein, 735 aa, Adeno-associated virus
MAADGYLPDWLEDTLSEGIRQWWKLKPGPPPPKPAERHQDDSRGLVLPGYKYLGPFNGLDKGEPVNEADAAALEHDKAYDRQLDSGDNPYLKYNHADAEFQERLKEDTSFGGNLGRAVFQAKKRVLEPLGLVEEPVKTAPGKKRPVEHSPVEPDSSSGTGKAGHQPARKRLNFGQTGDADSVPDPQPLGQPPAAPTSLGSTTMATGSGAPMADNNEGADGVGNSSGNWHCDSQWLGDRVITTSTRTWALPTYNNHLYKQISSQSGASNDNHYFGYSTPWGYFDFNRFHCHFSPRDWQRLINNNWGFRPKRLNFKLFNIQVKEVTQNDGTTTIANNLTSTVQVFTDSEYQLPYVLGSAHQGCLPPFPADVFMVPQYGYLTLNNGSQAVGRSSFYCLEYFPSQMLRTGNNFTFSYTFEDVPFHSSYAHSQSLDRLMNPLIDQYLYYLNRTQSNSGTLQQSRLLFSQAGPTSMSLQAKNWLPGPCYRQQRLSKQANDNNNSNFPWTAATKYRLNGRDSLVNPGPAMASHKDDEEKFFPMHGTLIFGKQGTNANDADLEHVMITDEEEIRTTNPVATEQYGNVSNNLQNSNTGPTTENVNHQGALPGMVWQDRDVYLQGPIWAKIPHTDGHFHPSPLMGGFGLKHPPPQIMIKNTPVPANPPTNFSSAKFASFITQYSTGQVSVEIEWELQKENSKRWNPEIQYTSNYNKSVNVDFTVDTNGVYSEPRPIGTRYLTRNL

SEQ ID NO: 185 - DNA, 2208 bp, Adeno-associated virus
atggctgccgatggttatcttccagattggctcgaggacactctctctgaaggaataagacagtggtggaagctcaaacctggcccaccaccaccaaagcccgcagagcggcatcaggacgacagcaggggtcttgtgcttcctgggtacaagtacctcggacccttcaacggactcgacaaaggagagccggtcaacgaggcagacgccgcggccctcgagcacgacaaggcctacgaccggcagctcgacagcggagacaacccgtacctcaagtacaaccacgccgacgcggagtttcaggagcgtcttaaagaagatacgtcttttgggggcaacctcggacgagcagtcttccaggcgaaaaagagggttcttgaacctctgggcctggttgaggaacctgttaagacggctccgggaaaaaagaggccggtagagcactctcctgtggagccagactcctcctcgggaaccggaaaagcgggccatcagcctgcgagaaagagattgaattttggtcagactggagacgcagactccgtacctgacccccagcctctcggacagccaccagcagcccccacaagtttgggatctactacaatggctacaggcagtggcgcaccaatggcagacaataacgagggtgccgatggagtgggtaattcctcaggaaattggcattgcgattcccaatggctgggcgacagagtcatcaccaccagcacccgaacctgggccctgcccacctacaacaaccacctctacaagcaaatctccagccaatcaggagcctcgaacgacaaccactactttggctacagcaccccctgggggtattttgacttcaacagattccactgtcacttctccccacgtgattggcaaagactcatcaacaacaactggggattccgacccaagagactcaacttcaagctctttaacattcaagtcaaagaggtcacgcagaatgacggtacgacgacgattgccaataaccttaccagcacggttcaggtgtttactgactcggagtaccagctcccgtacgtcctcggctcggcgcatcaaggatgcctcccgccgtttccagcggacgtcttcatggtcccacagtatggatacctcaccctgaacaacgggagtcaggcggtaggacgcccttccttttactgcctggagtactttccttctcagatgctgcgtactggaaacaactttaccttcagctacacctttgaggacgttcctttccacagcagctacgctcacagccagagtttggaccggctgatgaatcctctgatcgaccagtatctatattatctgaacaggacacaatcaaatagtggaactcttcagcagtctaggctactgtttagccaagctggacccaccagcatgtctcttcaagctaaaaactggctgcctggaccttgctacagacagcagcgtctttcaaagcaggcaaacgacaacaacaacagcaactttccctggactgcggctacaaagtatcatctaaatggccgggactcgttggttaatccaggaccagctatggccagccacaaagacgatgaagaaaagtttttccccatgcatgggaccctgatatttggtaaacaaggaacaaatgctaacgacgcggatttggagcatgttatgattacagatgaagaagaaatcaggaccaccaatcctgtggctacagagcagtacggaaacgtgtcaaataatttgcaaaactcaaatactggtccaactacagaaaatgtcaatcaccagggagcgttacctggtatggtgtggcaggatcgagacgtgtacctgcagggacccatttgggccaagattcctcacaccgacggacactttcacccttctccactgatgggaggttttggactcaaacacccgcctcctcaaatcatgatcaaaaacactcccgttccagccaatcctcccacaaacttcagttctgccaagtttgcttctttcatcacacagtattccacgggccaggtcagcgtggagattgagtgggagctgcagaaggagaacagcaaacgctggaaccccgagatccagtatacttccaactacaacaaatctgttaatgtggactttactgtggacactaatggtgtgtattcagagcctcgccccattggcaccagatacctgactcgtaatctgtaa

SEQ ID NO: 186 - protein, 735 aa, Adeno-associated virus
MAADGYLPDWLEDTLSEGIRQWWKLKPGPPPPKPAERHQDDSRGLVLPGYKYLGPFNGLDKGEPVNEADAAALEHDKAYDRQLDSGDNPYLKYNHADAEFQERLKEDTSFGGNLGRAVFQAKKRVLEPLGLVEEPVKTAPGKKRPVEHSPVEPDSSSGTGKAGHQPARKRLNFGQTGDADSVPDPQPLGQPPAAPTSLGSTTMATGSGAPMADNNEGADGVGNSSGNWHCDSQWLGDRVITTSTRTWALPTYNNHLYKQISSQSGASNDNHYFGYSTPWGYFDFNRFHCHFSPRDWQRLINNNWGFRPKRLNFKLFNIQVKEVTQNDGTTTIANNLTSTVQVFTDSEYQLPYVLGSAHQGCLPPFPADVFMVPQYGYLTLNNGSQAVGRPSFYCLEYFPSQMLRTGNNFTFSYTFEDVPFHSSYAHSQSLDRLMNPLIDQYLYYLNRTQSNSGTLQQSRLLFSQAGPTSMSLQAKNWLPGPCYRQQRLSKQANDNNNSNFPWTAATKYHLNGRDSLVNPGPAMASHKDDEEKFFPMHGTLIFGKQGTNANDADLEHVMITDEEEIRTTNPVATEQYGNVSNNLQNSNTGPTTENVNHQGALPGMVWQDRDVYLQGPIWAKIPHTDGHFHPSPLMGGFGLKHPPPQIMIKNTPVPANPPTNFSSAKFASFITQYSTGQVSVEIEWELQKENSKRWNPEIQYTSNYNKSVNVDFTVDTNGVYSEPRPIGTRYLTRNL

SEQ ID NO: 187 - DNA, 2208 bp, Adeno-associated virus
atggctgccgatggttatcttccagattggctcgaggacactctctctgaaggaataagacagtggtggaagctcaaacctggcccaccaccaccaaagcccgcagagcggcataaggacgacagcaggggtcttgtgcttcctgggtacaagtacctcggacccttcaacggactcgacaagggagagccggtcaacgaggcagacgccgcggccctcgagcacgacaaggcctacgaccggcagctcgacagcggagacaacccgtacctcaagtacaaccacgccgacgcggagtttcaggagcgccttaaagaagatacgtcttttgggggcaacctcggacgagcagtcttccaggcaaaaaagagggttcttgaacctctgggcctggttgaggagcctgttaaaacggctccgggaaaaaagaggccggtagagcactctcctgcggagccagactcctcctcgggaaccggaaaagcgggccagcagcctgcaagaaaaagattgaatttcggtcagactggagacgcagactccgtacctgacccccagcctctcggacagccaccagcagccccctctggtctgggaactaatacgatggcttcaggcagtggcgcaccaatggcagacaataacgagggcgccgacggagtgggtaattcctcgggaaattggcattgcgattccacatggatgggcgacagagtcatcaccaccagcacccgaacttgggccctgcccacctacaacaaccatctctacaagcaaatctccagccaatcaggagccagcaacgacaaccactactttggctacagcaccccttgggggtattttgacttcaacagattccactgccacttttcaccacgtgactggcaaagactcatcaacaacaactggggattccggcccaagagactcaacttcaagctctttaacattcaagtcaaagaggtcacgcagaatgacggtacgacgacgattgccaataaccttaccagcacggttcaggtgtttactgactcggagtaccagctcccgtacgtcctcggctcggcgcatcaaggatgcctcccgccgttcccagcagacgtcttcatggtgccacagtatggatacctcaccctgaacaacgggagtcaggcagtaggacgctcttcattttactgcctggagtactttccttctcagatgctgcgtaccggaaacaactttaccttcagctacacctttgaggacgttcctttccacagcagctacgctcacagccagagtttggaccgtctcatgaatcctctcatcgaccagtacctgtattacttgagcagaacaaacactccaagcggaaccaccacgcagtccaggcttcagttttctcaggccggagcaagtgacattcgggaccagtctaggaactggcttcctggaccctgttaccgccagcagcgagtatcaaagacatctgcggataacaacaacagtgaatactcgtggactggagctaccaagtaccacctcaatggcagagactctctggtgaatccgggcccggccatggccagccacaaggacgatgaagaaaagttttttcctcagagcggggttctcatctttgggaagcaaggctcagagaaaacaaatgtggacattgaaaaggtcatgattacagacgaagaggaaatcaggaccaccaatcccgtggctacggagcagtatggttctgtatctaccaacctgcagggcggcaacacacaagcagctaccgcagatgtcaacacacaaggcgttcttccaggcatggtctggcaggacagagacgtgtacctgcaggggcccatctgggcaaagattccacacacggacggacattttcacccctctcccctcatgggcggattcggacttaaacaccctcctccacagattctcatcaagaacaccccggtacctgcgaatccttcgaccaccttcagtgcggcaaagtttgcttctttcatcacacagtattccacggggcaggtcagcgtggagatcgagtgggagctgcagaaggagaacagcaaacgctggaatcccgagatccagtacacttccaactacaacaaatctgttaatgtggactttactgttgacactaatggcgtgtattcagagcctcgccccattggcaccagatacctgactcgtaatctgtaa

SEQ ID NO: 188 - protein, 735 aa, Adeno-associated virus
MAADGYLPDWLEDTLSEGIRQWWKLKPGPPPPKPAERHKDDSRGLVLPGYKYLGPFNGLDKGEPVNEADAAALEHDKAYDRQLDSGDNPYLKYNHADAEFQERLKEDTSFGGNLGRAVFQAKKRVLEPLGLVEEPVKTAPGKKRPVEHSPAEPDSSSGTGKAGQQPARKRLNFGQTGDADSVPDPQPLGQPPAAPSGLGTNTMASGSGAPMADNNEGADGVGNSSGNWHCDSTWMGDRVITTSTRTWALPTYNNHLYKQISSQSGASNDNHYFGYSTPWGYFDFNRFHCHFSPRDWQRLINNNWGFRPKRLNFKLFNIQVKEVTQNDGTTTIANNLTSTVQVFTDSEYQLPYVLGSAHQGCLPPFPADVFMVPQYGYLTLNNGSQAVGRSSFYCLEYFPSQMLRTGNNFTFSYTFEDVPFHSSYAHSQSLDRLMNPLIDQYLYYLSRTNTPSGTTTQSRLQFSQAGASDIRDQSRNWLPGPCYRQQRVSKTSADNNNSEYSWTGATKYHLNGRDSLVNPGPAMASHKDDEEKFFPQSGVLIFGKQGSEKTNVDIEKVMITDEEEIRTTNPVATEQYGSVSTNLQGGNTQAATADVNTQGVLPGMVWQDRDVYLQGPIWAKIPHTDGHFHPSPLMGGFGLKHPPPQILIKNTPVPANPSTTFSAAKFASFITQYSTGQVSVEIEWELQKENSKRWNPEIQYTSNYNKSVNVDFTVDTNGVYSEPRPIGTRYLTRNL

SEQ ID NO: 189 - DNA, 3161 bp, Adeno-associated virus
gattgaatttagcggccgcgaattcgcccttgctgcgtcaactggaccaatgagaactttccattcaatgattgcgtcgacaagatggtgatctggtgggaggagggaaagatgaccgccaaggtcatggagtcggccaaagccattctcggaggaagcaaggtgcgcgtggaccagaaatgtaagtcctcggcccagatagacccgactcccgtgattgtcacctccaacaccaacatgtgcgccgtgattgacgggaactcaacgaccttcgagcaccagcagccgttgcaagaccggatgttcaaatttgaactcacccgccgtctggatcatgactttgggaaggtcaccaagcaggaagtcaaagactttttccggtgggcaaaggatcacgtggttgaggtggagcatgaattctacgtcaaaaagggtggagccaagaaaagacccgcccccagtgacgcagatataagtgagcccaaacgggcgcgcgggtcagttgcgcagccatcgacgtcagacgcggaagcttcgatcaactacgcggacaggtaccaaaacaaatgttctcgtcacgtgggcatgaatctgatgctgtttccctgcagacaatgcgagagaatgaatcaaaattcaaatatctgcttcactcacggacagaaggactgtttagagtgctttcccgtgtcagaatctcaacccgtttctgtcgtcaaaaaggcgtatcagaaactttgctacattcatcatatcatgggaaaggtgccagacgcttgcactgcctgcgatctggtcaatgtggatttggatgactgcatctctgaacaataaatgatttaaatcaggtatggctgccgatggttatcttccagattggctcaaggacactctctctgaaggaataagacagtggtggaagctcaaacctggcccaccaccaccaaagcccgcagagcggcataaggacgacagcgggggtcttgtgcttcctgggtacaagtacctcggacccttcaacggactcgacaagggagagccggtcaacgaggcagacgccgcggccctcgagtacgacaaggcctacgaccggcagctcgacagcggagacaacccgtacctcaagtacaaccacgccgacgcggagtttcaggagcgccttaaagaagatacgtcttttgggggcaacctcggacgagcagtcttccaggcgaaaaagagggttcttgaacctctgggcctggttgaggaacctgttaagacggctccgggaaaaaagaggccggtagagcactctcctgtggagccagactcctcctcgggaacaggaaaagcgggccagcagcctgcgagaaagagattgaattttggtcagactggagacgcagactccgtacctgacccccagcctctcggacagccaccagcagccccctctggtctgggaactaatacgatggctacaggcagtggcgcaccaatggcagacaataacgagggcgccgacggagtgggtaattcctcgggaagttggcattgcgattccacatggatgggcgacagagtcatcaccaccagcacccgaacctgggctctgcccacctacaacaaccatctgtacaagcagatctccagccaatcaggagccagcaacgacaaccactactttggctacagcaccccttgggggtattttgacttcaacagattccactgccacttttcaccacgtgactggcaaagactcatcaacaacaactggggattccggcccaagagactcaacttcaagctctttaacattcaagtcaaggaggtcacgcagaatgacggtacgacgacgattgccaataaccttaccagcacggttcaggtgtttactgactcggagtaccagctcccgtacgtccccggctcggcgcatcaaggatgcctcccgccgttcccagcagacgtcttcatggtgccacagtatggatacctcaccctgaacaacgggagtcaggcagtaggacgctcttcattttactgcctggagtactttccttctcagatgcttcgtaccggaaacaactttaccttcagctacacctttgaggatgttcctttccacagcagctacgctcacagccagagtttggaccgtctcatgaatcctctcatcgaccagtacctgtattacttgagcagaacaaacactccaagcggaaccaccacgcagtccaggcttcagttttctcaggccggagcaagtgacattcgggaccagtctaggaactggcttcctggaccctgttaccgccagcagcgagtatcaaagacagctgcggacaacaacaacagtgaatactcgtggactggagctaccaagtaccacctcaatggcagagactctctggtgaatccgggcccggccatggccagccacaaggacgatgaagaaaagttttttcctcaaagcggggttctcatctttgggaagcaaggctcagagaaaacaaatgtggacattgaaaaggtcatgattacagacgaagaggaaatcagaaccaccaatcccgtggccacggagcagtatggttctgtatctaccaacctccagagcggcaacacacaagcagctactgcagatgtcaacacacaaggcgttcttccaggcatggtctggcaggacagagacgtgcacctgcaggggcctatctgggcaaagattccacacacggacggacattttcacccctctcccctcatgggcggatttggacttaaacaccctcctccacagattctcatcaagaacaccccggtacctgcaaatccttcgaccaccttcagtgcggcaaagtttgcttccttcatcacacagtattccacagggcaggtcagcgtggagatcgagtgggagctgcagaaggagaacagcaaacgctggaaccccgagatccagtacacttccaactacaacaaatctgttaatgtggactttactgtggacactaatggtgtgtattcagagcctcgccccattggcaccagatacctgactcgtaatctgtaattgcttgttaatcaataaaccgtttaattcgtttcagttgaactttggtctctgcgaagggcgaattcgtttaaaccctgcaggactagtccctttagtgagg

SEQ ID NO: 190 - DNA, 3162 bp, Adeno-associated virus
gaattgaatttagcggccgcgaattcgcccttcgcagagaccaaagttcaactgaaacgaattaaacggtttattgattaacaagcaattacagattacgagtcaggtatctggtgccaatggggcgaggctctgaatacacgccattagtgtccacagtaaagtccacattaacagacttgttgtagttggaagtgtactgaatttcgggattccagcgtttgctgttttccttctgcagctcccactcgatctccacgctgacctgtcccgtggagtactgtgtgatgaaggaagcaaactttgccgcactgaaggtggtcgaaggattcgcaggtaccggggtgttcttgatgagaatctgtggaggagggtgtttaagtccgaatccacccatgaggggagaggggtgaaaatgtccgtccgtgtgtggaatctttgcccagatgggcccctgaaggtacacatctctgtcctgccagaccatgcctggaagaacgccttgtgtgttgacatctgcggtagctgcttgtctgttgcctctctggaggttggtagatacagaaccgtactgctccgtagccacgggattggttgtcctgatttcctcttcgtctgtaatcatgaccttttcaatgtccacatttgttttctctgagccttgcttcccaaagatgagaaccccgctctgaggaaaaaacttttcttcattgtccttgtggcttgccatggccgggcccggattcaccagagagtctctgccattgaggtggtacttggtagctccagtccacgagtattcactgttgttgttatccgcagatgtctttgatactcgctgctggcggtaacagggtccaggaagccagttcctagactggtcccgaatgtcactcgctccggcctgagaaaactgaagccttgactgcgtggtggttccacttggagtgtttgttgtgctcaagtaatacaggtactggtcgatgagaggattcatgagacggtccagactctggctgtgagcgtagccgctgtggaaaggaacgtcctcaaaagtgtagctgaaggtaaagttgtttccggtacgcagcatctgagaaggaaagtactccaggcagtaaaatgaagagcgtcctactgcctgactcccgttgttcagggtgaggtatccatactgtggcaccatgaagacgtctgctgggaacggcgggaggcatccttgatgcgccgagccgaggacgtacgggagctggtactccgagtcagtaaacacctgaaccgtgctggtaaggttattggcaatcgtcgtcgtaccgtcattctgcgtgacctctttgacttgaatgttaaagagcttgaagttgagtctcttgggtcggaatccccagttgttgttgatgagtctttgccagtcacgtggtgaaaagtggcagtggaatctgttgaagtcaaaatacccccaaggggtgctgtagccaaagtagtgattgtcgttcgaggctcctgattggctggaaatttgtttgtagaggtggttgttgtaggtgggcagggcccaggttcgggtgctggtggtgatgactctgtcgcccatccatgtggaatcgcaatgccaatttcccgaggaattacccactccgtcggcgccctcgttattgtctgccattggtgcgccactgcctgtagccatcgtattagttcccagaccagagggggctgctggtggctgtccgagaggctgggggtcaggtactgagtctgcgtctccagtctgaccaaaattcaatctttttcttgcaggctgctggcccgcctttccggttcccgaggaggagtctggctccacaggagagtgctctaccggcctcttttttcctggagccgtcttgacaggttccccaaccaggcccagaggttcaagaaccctctttttcgcctggaagactgctcgtccgaggttgcccccaaaagacgtatcttctttaaggcgctcctgaaactccgcgtcggcgtggttgtacttgaggtacgggttgtctccgctgtcgagctgccggtcgtaggctttgtcgtgctcgagggccgcggcgtctgcctcgttgaccggctctcccttgtcgagtccgttgaagggtccgaggtacttgtacccaggaagcacaagacccctgctgtcgtccttatgccgctctgcgggctttggtggtggtgggccaggtttgagcttccaccactgtcttattccttcagagagagtgtcctcgagccaatctggaagataaccatcggcagccatacctgatttaaatcatttattgttcaaagatgcagtcatccaaatccacattgaccagatcgcaggcagtgcaagcgtctggcacctttcccatgatatgatgaatgtagcacagtttctgatacgcctttttgacgacagaaacgggttgagattctgacacgggaaagcactctaaacagtctttctgtccgtgagtgaagcagatatttgaattctgattcattctctcgcattgtctgcagggaaacagcatcagattcatgcccacgtgacgagaacatttgttttggtacctgtctgcgtagttgatcgaagcttccgcgtctgacgtcgatggctgcgcaactgactcgcgcacccgtttgggctcacttatatctgcgtcactgggggcgggtcttttcttggctccaccctttttgacgtagaattcatgctccacctcaaccacgtgatcctttgcccaccggaaaaagtctttgacttcctgcttggtgaccttcccaaagtcatgatccagacggcgggtgagttcaaatttgaacatccggtcttgcaacggctgctggtgttcgaaggtcgttgagttcccgtcaatcacggcgcacatgttggtgttggaggtgacgatcacgggagtcgggtctatctgggccgaggacttgcatttctggtccacgcgcaccttgcttcctccgagaatggctttggccgactccacgaccttggcggtcatcttcccctcctcccaccagatcaccatcttgtcgacacagtcgttgaagggaaagttctcattggtccagttgacgcagcaagggcgaattcgtttaaacctgcaggactagtccctttagtgaggg

SEQ ID NO: 191 - DNA, 3164 bp, Adeno-associated virus
gcgaattgaatttagcggccgcgaattcgcccttcgcagagaccaaagttcaactgaaacgaattaaacggtttattgattaacaagcaattacaaattacgagtcaggtatctggtgccaatggggcgaggctctgaatacacgccattagtgtccacagtaaagtccacattaacagacttgttgtagttggaagtgtactgaatttcgggattccagcgtttgctgttttccttctgcagctcccactcgatctccacgctgacctgtcccgtggagtactgtgtgatgaaggaagcaaactttgccgcactgaaggtggtcgaaggattcgcaggtaccggggtgttcttgatgagaatctgtggaggagggtgtttaggtccgaatccacccatgaggggagaggggtgaaaatgtccgtccgtgtgtggaatctttgcccagatgggcccctgaaggtacacatctctgtcctgccagaccatgcctggaagaacgccttgtgtgttgacatctgcggtagctgcttgtctgttgcctctctggaggttggtagatacagaaccatactgctccgtagccacgggattggttgtcctgatttcctcttcgtctgtaatcatgaccttttcaatgtccacatttgttttctctgagccttgcttcccaaagatgagaaccccgctctgaggaaaaaacttttcttcattgtccttgtggcttgccatggccgggcccggattcaccagagagtctctgccattgaggtggtacttggtagctccagtccacgagtattcactgttgttgttatccgcagatgtctttgatactcgctgctggcggtaacagggtccaggaagccagttcctagactggtcccgaatgtcactcgctccggcctgagaaaactgaagccttgactgcgtggtggttccacttggagtgtttgttgtgctcaagtaatacaggtactggtcgatgagaggattcatgagacggtccagactctggctgtgagcgtagctgctgtggaaaggaacgtcctcaaaagtgtagctgaaggtaaagttgtttccggtacgcagcatctgagaaggaaagtactccgggcagtaaaatgaagagcgtcctactgcctgactcccgttgctcagggtgaggtatccatactgtggcaccatgaagacgtctgctgggaacggcgggaggcatccttgatgcgccgagccgaggacgtacgggagctggtactccgagtcagtaaacacctgaaccgtgctggtaaggttattggcaatcgtcgtcgtaccgtcattctgcgtgacctctttgacttgaatgttaaagagcttgaagttgagtctcttgggtcggaatccccagttgttgttgatgagtctttgccagtcacgtggtgaaaagtggcagtggaatctgttgaagtcaaaatacccccaaggggtgctgtagccaaagtagtgattgtcgttcgaggctcctgattggctggaaatttgtctgtagaggtggttgttgtaggtgggcagggcccaggttcgggtgctggtggtgatgactctgtcgcccatccatgtggaatcgcaatgccgatttcccgaggaattacccactccgtcggcgccctcgttattgtctgccattggtgcgccactgcctgtagccatcgtattagttcccagaccagagggggctgctggtggctgtccgagaggctgggggtcaggtactgagtctgcgtctccagtctgaccaaaattcaatctttttcttgcaggctgctggcccgcctttccggttcccgaggaggagtctggctccacaggagagtgctctaccggcctcttttttcccggagccgtcttaacaggttccccaaccaggcccagaggttcaagaaccctctttttcgcctggaagactgctcgtccgaggttgcccccaaaagacgtatcttctttaaggcgctcctgaaactccgcgtcggcgtggttgtacttgaggtacgggttgtctccgctgtcgagctgccggtcgtaggctttgtcgtgctcgagggccgcggcgtctgcctcgttgaccggctctcccttgtcgagtccgttgaagggtccgaggtacttgtacccaggaagcacaagacccctgctgtcgtccttatgccgctctgcgggctttggtggtggtgggccaggtttgagcttccaccactgtcttattccttcagagagagtgtcctcgagccaatctggaagataaccatcggcagccatacctgatttaaatcatttattgttcaaagatgcagtcatccaaatccacattgaccagatcgcaggcagtgcaagcgtctggcacctttcccatgatatgatgaatgtagcacagtttctgatacgcctttttgacgacagaaacgggttgagattctgacacgggaaagcactctaaacagtctttctgtccgtgagtgaagcagatatttgaattctgattcattctctcgcattgtctgcagggaaacagcatcagattcatgcccacgtgacgagaacatttgttttggtacctgtctgcgtagttgatcgaagcttccgcgtctgacgtcgatggctgcgcaactgactcgcgcacccgtttgggcccacttatatctgcgtcactgggggcgggtcttttcttggctccaccctttttgacgtagaattcatgctccacctcaaccacgtgatcctttgcccaccggaaaaagtctttgacttcctgcttggtgaccttcccaaagtcatgatccagacggcgggtgagttcaaatttgaacatccggtcttgcaacggctgctggtgttcgaaggtcgttgagttcccgtcaatcacggcgcacatgttggtgttggaggtgacgatcacgggagtcgggtctatctgggccgaggacttgcatttctggtccacgcgcaccttgcttcctccgagaatggctttggccgactccacgaccttggcggtcatcttcccctcctcccaccagatcaccatcttgtcgacacagtcgttgaagggaaagttctcattggtccagttgacgcagcaagggcgaattcgtttaaacctgcaggactagtccctttagtgaggg

SEQ ID NO: 192 - DNA, 3163 bp, Adeno-associated virus
accctcactaaagggactagtcctgcaggtttaaacgaattcgcccttgctgcgtcaactggagcaatgagaactttcccttcaacgactgtgtcgacaagatggtgatttggtgggaggaggggaagatgaccgccaaggtcgtggagtcggccaaagccattctcggaggaagcaaggtgcgcgtggaccagaaatgcaagtcctcggcccagatagatccgactcccgtgatcgtcacctccaacaccaacatgtgcgccgtgattgacgggaactcaacgaccttcgaacaccagcagccgttgcaagaccggatgttcaaatttgaactcacccgccgtctggatcatgactttgggaaggtcaccaagcaggaagtcaaagactttttccggtgggcaaaggatcacgtggttgaggtggagcatggattctacgtcaaaaagggtggagccaagaaaagacccgcccctagtgacgcagatataagtgagcccaaacgggtgcgcgagtcagttgcgcagccatcgacgtcggacgcggaagcttcgatcaactacgcggacaggtaccaaaacaaatgttctcgtcacgtgggcatgaatctgatgctgtttccctgcagacaatgcgagagaatgaatcaaaattcaaatatctgcttcactcacggacagaaagactgtttagagtgctttcccgtgtcagaatctcaacctgtttctgtcgtcaaaaaggcgtatcagaaactgcgctacattcatcatatcatgggaaaggtgccagacgcttgcactgcctgcgatctggtcaatgtggatttggatgactgcatctctgaacaataaatgatttaaatcaggtatggctgccgatggttatcttccagattggctcgaggacactctctctgaaggaataagacagtggtggaagctcaaacctggcccaccaccaccaaagcccgcagagcggcataaggacgacagcaggggtcttgtgcttcctgggtacaagtacctcggacccttcaacggactcgacaagggagagccggtcaacgaggcagacgccgcggccctcgagcacgacaaggcctacgaccggcagctcgacagcggagacaacccgtacctcaagtacaaccacgccgacgcggagtttcaggagcgtcttaaagaagatacgtcttttgggggcaacctcggacgagcagtcttccaggcgaaaaagagggttcttgaacctctgggcctggttgaggaacctgttaagacggctccgggaaaaaagaggccggtagagcactctcctgcggagccagactcctcctcgggaaccggaaaagcgggccagcagcctgcaagaaaaagactgaatttcggtcagactggagacgcagactccgtacctgacccccagcctctcggacagccaccagcagcccccacaagtttgggatctactacaatggctacaggcagtggcgcaccaatggcagacaataacgagggtgccgatggagtgggtaattcctcaggaaattggcattgcgattcccaatggctgggcgacagagtcatcaccaccagcacccgaacctgggccctgcccacctacaacaaccacctttacaagcaaatctccagccaatcaggagcctcaaacgacaaccactactttggctacagcaccccctgggggtattttgacttcaacagattccactgccacttttcaccacgtgactggcaaagactcatcaacaacaactggggattccgacccaagagactcaacttcaagctctttaacattcaagtcaaagaggtcacgcagaatgacggtacgacgacgattgccaataaccttaccagcacggttcaggtgtttactgactcggagtaccagctcccgtacgtcctcggctcggcgcatcaaggatgcctcccgccgtttccagcggacgtcttcatggtcccacagtatggatacctcaccctgaacaacgggagtcaggcggtaggacgctcttccttttactgcctggagtgctttccttctcagatgctgcgtactggaaacaactttcagttcagctacacttttgaagacgtgcctttccacagcagctacgctcacagccagagtttggatcggctgatgaatcctctgatcgaccagtacctgtattatctaaacagaacacaaacagctagtggaactcagcagtctcggctactgtttagccaagctggacccacaagcatgtctcttcaagctaaaaactggctgcctggaccgtgttatcgccagcagcgtttgtcaaagcaggcaaacgacaacaacaacagcaactttccctggactggagctaccaagtaccacctcaatggcagagactctttggtgaacccgggcccggccatggccagccacaaggacgatgaagaaaagtttttccccatgcatggaaccctaatatttggtaaagaaggaacaaatgctaccaacgcggaattggaaaatgtcatgattacagatgaagaggaaatcaggaccaccaatcccgtggctacagagcagtacggatatgtgtcaaataatttgcaaaactcaaatactgctgcaagtactgaaactgtgaatcaccaaggagcattacctggtatggtgtggcaggatcgagacgtgtacctgcagggacccatttgggccaagattcctcacaccgatggacactttcatccttctccactgatgggaggttttggactcaaacacccgcctcctcagattatgatcaaaaacactcccgttccagccaatcctcccacaaacttcagttctgccaagtttgcttccttcatcacacagtattccacgggacaggtcagcgtggagatcgagtgggagctgcagaaggagaacagcaaacgctggaatcccgaaattcagtacacttccaactacaacaaatctgttaatgtggactttactgtggacactaatggtgtgtattcagagcctcgccccattggcaccagatacctgactcgtaatctgtaattgcttgttaatcaataaaccgtttaattcgtttcagttgaactttggtctctgcgaagggcgaattcgcggccgctaaattcaattcgcc

SEQ ID NO: 193 - protein, 735 aa, Adeno-associated virus
MAADGYLPDWLEDTLSEGIRQWWKLKPGPPPPKPAERHKDDSRGLVLPGYKYLGPFNGLYKGEPVDEADAAALEHDKAYDRQLDSGDNPYLKYNHADAEFQERLKEDTSFGGNLGRAVFQAKKRVLEPLGLVGEPVKTAPGKKRPVEHSPVEPDSSSGTGKAGNQPARKRLNFGQTGDADSVPDPQPLGQPPAAPSGLGSTTMATGSGAPVADNNEGADGVGNSSGNWHCDSQWLGDRVITTSTRTWALPTYNNHLYKQISSQSGASNDNHYFGYSTPWGYFDFNRFHCHFSPRDRQRLINNNWGFRPKRLNFKLFNIQVKEVTQNDGTTTIANNLTSTVQVFTDSGYQLPYVLGLAHQGCLPPFPADVFMVPQYGYLTLNNGSQAVGRSSFYCLEYFPSQMLRTGNNFQFSYTFEDVPFHSSYAHSQSLDRLMNPLIDQYLYYLNKTQSNSGTLQQSRLLFSQAGPTSMSLQAKNWLPGPCYRQQRLSKQANDNNNSNFPWTAATKYHLNGRDSLVNPGPAMASHKDDEEKFFPMHGTLIFGKQGTNANDADLDNVMITDEEEIRTTNPVATEQYGYVSNNLQNSNTGPTTGTVNHQGALPGMVWQDRDVYLQGPIWAKIPHTDGHFHPSPLMGGFGLKHPPPQIMIKNTPVPANPPTNFSSAKFASFITQYSTGQVSVEIEWELQKEDSKRWNPEIQYTSNYNKPVNVDFTVDTNGVYSEPRPIGTRYLTRNL

SEQ ID NO: 194 - DNA, 2208 bp, Adeno-associated virus
atggctgccgatggttatcttccagattggctcgaggacactctctctgaaggaataagacagtggtggaagctcaaacctggcccaccaccaccaaagcccgcagagcggcataaggacgacagcaggggtcttgtgcttcctgggtacaagtacctcggacccttcaacggactctacaagggagagccggtcgacgaggcagacgccgcggccctcgagcacgacaaggcctacgaccggcagctcgacagcggagacaacccgtacctcaagtacaaccacgccgacgcggagtttcaggagcgccttaaagaagatacgtcttttgggggcaacctcggacgagcagtcttccaggccaaaaagagggttcttgaacctctgggcttggttggggagcctgttaaaacggctccgggaaaaaagaggccggtagagcactctcctgtggagccagactcctcctcgggaaccggaaaagcgggcaaccagcctgcaagaaaaagattgaattttggtcagactggagacgcagactccgtacctgacccccagcctctcggacagccaccagcagccccctctggtctgggatctactacaatggctacaggcagtggcgcaccagtggcagacaataacgagggtgccgatggagtgggtaattcctcaggaaattggcattgcgattcccaatggctgggcgacagagtcatcaccaccagcacccgaacctgggctctgcccacctacaataaccacctctacaagcaaatctccagccaatcaggagcctcaaacgacaaccactactttggctacagcaccccctgggggtattttgacttcaacagattccactgccacttttcaccacgtgaccggcaaagactcatcaacaacaactggggattccgaccaaaaagactcaacttcaagctctttaacattcaagtcaaagaggtcacgcagaatgacggtacgacgacgattgccaataaccttaccagcacggttcaggtgtttactgactcggggtaccagctcccgtacgtcctcggcttggcgcatcaaggatgcctcccgccgttcccagcagacgtcttcatggtgccacagtatggatacctcaccctgaacaacgggagtcaggcggtaggacgctcttccttttactgcctggagtactttccttctcagatgctgcgtactggaaacaactttcagttcagctacacctttgaagacgttcctttccacagcagctacgctcacagccagagtctggatcggctgatgaatcctctgatcgaccagtacctgtattatctgaacaagacacaatcaaatagtggaactcttcagcagtctcggctactgtttagccaagctggacccaccagcatgtctcttcaagctaaaaactggctgcctggaccttgctacagacagcagcgtctgtcaaagcaggcaaacgacaacaacaacagcaactttccctggactgcggctacaaagtatcatctaaatggccgggactcgttggttaatccaggaccagctatggccagccacaaagacgatgaagaaaagtttttccccatgcatggaaccctgatatttggtaaacaaggaacaaatgctaacgacgcggatttggacaatgtcatgattacagatgaagaagaaatccgcaccaccaatcccgtggctacggagcagtacggatatgtgtcaaataatttgcaaaactcaaatactggtccaactactggaactgtcaatcaccaaggagcgttacctggtatggtgtggcaggatcgagacgtgtacctgcagggacccatttgggccaagattcctcacaccgatggacactttcatccttctccacttatgggaggttttggactcaaacacccacctcctcagatcatgattaaaaacactcccgttccagccaatcctcccacaaacttcagttctgccaagtttgcttctttcatcacacagtattccacgggacaagtcagcgtggagatcgagtgggagctgcagaaggaggacagcaaacgctggaaccccgagatccagtacacttccaactataacaaacctgttaatgtggactttactgtggacactaatggtgtgtattcagagcctcgccccattggcaccagatacctgactcgtaatctgtaa

SEQ ID NO: 195 - DNA, 3161 bp, Adeno-associated virus
cgaattgatttagcggccgcgaattcgcccttcgcagagaccaaagttcaactgaaacgaattaaacggtttattgattaacaagcaattacagattacgagtcaggtatctggtgccaatggggcgaggctctgaatacacaccattagtgtccacagtaaagtccacattaacagatttgttgtagttggaagtgtactggatctcgggattccagcgtttgctgttctccttctgtagctcccactcgatctccacgctgacccgccccgtggaatactgtgtgatgaaggaagcaaactttgccgcactgaaggtggtcgaaggattcgcaggtaccggggtgtttttgatgagaatctgtggaggagggtgtttaagtccgaatccgcccatgaggggagaggggtgaaaatgtccgtccgtgtgcggaatctttgcccagataggcccctgcaggtacacgtctctgtcctgccagaccatgcctggaagaacgccttgtgtgttgacatctgcagtagatgcttgtgtgttgccgctctggaggttggtagatacagaaccatactgctccgtggccacgggattggtggttctgatttcctcttcgtctgtaatcatgaccttttcaatgtccacatttgttttctctgatccttgttttccaaagatgagaaccccgctctgaggaaaaaacttttcttcatcgtccttgtggctggccattgccgggcccggattcaccagagagtctctgccattgaggtggtacttggtagctccaatccacgagtattcactgttgttgttgtccgcagatgtctttgatactcgctgctggcggtaacagggtccaggaagccagttcctagactgatcccgaatgtcactcgctccggcctgagaaaactgaagcctggactgcgtggtggttccgcttggagtgtttgttctgctcaagtaatacaggtactggtcgatgagaggattcatgagacggtccaaactctggctgtgagcgtagctgctgtggaaaggaacatcctcaaaggtgtagctgaaggtaaagttgtttccggtacgcagcatctgagaagggaagtactccaggcagtaaaatgaagagcgtcctactgcctgactcccgttgttcagggtgaggtatccatactgtggcaccatgaagacgtctgctgggaacggcgggaggcatccttgatgcgccgagccgaggacgtacgggagctggtactccgagtcagtaaacacctgaaccgtgctggtaaggttattggcaatcgtcgtcgtaccatcattctgcgtgacctctctgacttgaatgttaaagagcttgaagttgagtctcttgggccggaatccccagttgttgttgatgagtctttgccagtcacgtggtgaaaagtggcagtggaatctgttgaagtcaaaatacccccaaggggtgctgtagccaaagtagtggttgtcgttgctggctcctgattggctggaaatctgcttgtacagatggttgttgtaggtgggcagagcccaggttcgggtgctggtggtgatgactctgtcgcccatccatgtggaatcgcaatgccaatttcccgaggaattacccactccgtcggcgccatcgttattgtctgccattggtgcgccactgcctgtagccatcgtattagttcccagaccagagggggctgctggtggctgtccgagaggctgggggtcaggtacggagtctgcgtctccagtctgaccgaaattcaatctctttcttgcaggctggttgcccgcttttccggttcccgaggaggagtctggctccacaggagagtgctctaccggcctcttttttcccggagccgtcttaacaggctcctcaaccaggcccagaggttcaagaaccctcttttttgcctggaagactgctcgtccgaggttgcccccaaaagacgtatcttctttaaggcgctcctgaaactccgcgtcggcgtggtcgtacttgaggtacgggttgtctccgctgtcgagctgccggtcgtaggccttgtcgtgctcgagggccgcggcgtctgcctcgttgaccggctctcccttgtcgagtccgttgaagggtccgaggtacttgtacccaggaagcacaagacccctgctgtcgtccttatgccgctctgcgggctttggtggtggtgggccaggtttgagcttccaccactgtcttattccttcagagagagtgtcctcgagccaatctggaagataaccatcggcagccatacctgatttaaatcatttattgttcagagatgcagtcatccaaatccacattgaccagatcgcaggcagtgcaagcgtctggcacctttcccatgatatgatgaatgtagcaaagtttctgatacgcctttttgacgacagaaacgggttgagattctgacacgggaaagcactctaaacagtctttctgtccgtgagtgaagcagatatttgaattctgattcattctctcgcattgtctgcagggaaacagcatcagattcatgcccacgtgacgagaacatttgttttggtacctgtccgcgtagttgatcgaagcttccgcgtctgacgtcgatggctgcgcaactgactcgcgcgcccgtttgggctcacttatatctgcgtcactgggggcgggtcttttcttggctccaccctttttgacgtagaattcatgctccacctcaaccacgtgatcctttgcccaccggaaaaagtctttcacttcctgcttggtgaccttcccaaagtcatgatccagacggcgggttagttcaaatttgaacatccggtcttgcaacggctgctggtgttcgaaggtcgttgagttcccgtcaatcacggcgcacatgttggtgttggaggtggcgatcacgggagtcgggtctatctgggccgaggacttgcacttttggtccacgcgcaccttgcttcctccgagaatggcttcggccgattccacgaccttggcggtcatctttccctcctcccaccagatcaccatcttgtcgacacagtcgttgaagggaaagttctcattggtccagttgacgcagcaagggcgaattcgtttaaacctgcaggaactagtcccttagtgagg

SEQ ID NO: 196 - protein, 735 aa, Adeno-associated virus
MAADGYLPDWLEDTLSEGIRQWWKLKPGPPPPKPAERHKDDSRGLVLPGYKYLGPFNGLYKGEPVNEADAAALEHDKAYDRQLDSGDNPYLKYNHAGAEFQERLKEDTSFGGNLGRAVFQAKKRVLEPLGLVEEPVKTAPGKKRPVEHSPVEPDSSSGTGKAGNQPARKRLNFGQTGDADSVPDPQPLGQPPAAPSGLGSTTMATGSGAPVADNNEGADGVGNSSGNWHCDSQWLGDRVITTSTRTWALPTYNNHLYKQISSQSGASNDNHYFGYSTPWGYFDFNRFHCHFSPRDWQRLINNNWGFRPKRLNFKLFNIQVKEVTQNDGTTTIANNLTSTVQVFTDSEYQLPYVLGSAHQGCLPPFPADVFMVPQYGYLTLNNGSQAVGRSSFYCLEYFPSQMLRTGNNFQFSYTFEDVPFHSSYAHSQSLDRLMNPLIDQYLYYLNKTQSNSGTLQQSRLLFSQAGPTSMSLQAKNWLPGPCYRQQRLSKQANDNNNSNFPWTAATKYHLNGRDSLVNPGPAMASHKDDEEKFFPMHGTLIFGKQGTNANDADLDNVMITDEEEIRTTNPVATEQYGYVSNNLQDSNTGPTTGTVNHQGALPGMVWQDRDVYLQGPIWAKIPHTDGHFHPSPLMGGFGLKHPPPQIMIKNTPVPANPPTNFSSAKFASFITQYSTGQVSVEIEWELQKENSKRWNPEIQYTSNYNKSVNVDFTVDTNGVYSEPRPIGTRYLTRNL

SEQ ID NO: 197 - DNA, 2208 bp, Adeno-associated virus
atggctgccgatggttatcttccagattggctcgaggacactctctctgaaggaataagacagtggtggaagctcaaacctggcccaccaccgccaaagcccgcagagcggcataaggacgacagcaggggtcttgtgcttcctgggtacaagtacctcggacccttcaacggactctacaagggagagccggtcaacgaggcagacgccgcggccctcgagcacgacaaggcctacgaccggcagctcgacagcggagacaacccgtacctcaagtacaaccacgccggcgcggagtttcaggagcgccttaaagaagatacgtcttttgggggcaacctcggacgagcagtcttccaggccaaaaagagggttcttgaacctctgggcttggttgaggagcctgttaaaacggctccgggaaaaaagaggccggtagagcactctcctgtggagccagactcctcctcgggaaccggaaaagcgggcaaccagcctgcaagaaaaagattgaattttggtcagactggagacgcagactccgtacctgacccccagcctctcggacagccaccagcagccccctctggtctgggatctactacaatggctacaggcagtggcgcaccagtggcagacaataacgagggtgccgatggagtgggtaattcctcaggaaattggcattgcgattcccaatggctgggcgacagagtcatcaccaccagcacccgaacctgggctctgcccacctacaacaaccacctctacaagcaaatctccagccaatcaggagcctcaaacgacaaccactactttggctacagcaccccctgggggtattttgacttcaacagattccactgccacttttcaccacgtgactggcaaagactcatcaacaacaactggggattccgaccaaagagactcaacttcaagctctttaacattcaagtcaaagaggtcacgcagaatgacggtacgacgacgattgccaataaccttaccagcacggttcaggtgtttactgactcggagtaccagctcccgtacgtcctcggctcggcgcatcaaggatgcctcccgccgttcccagcagacgtcttcatggtgccacagtatggatacctcaccctgaacaacgggagtcaggcggtaggacgctcttccttttactgcctggagtactttccttctcagatgctgcgtactggaaacaactttcagttcagctacacctttgaagacgttcctttccacagcagctacgctcacagccagagtctggatcggctgatgaatcctctgatcgaccagtacctgtattatctgaacaagacacaatcaaatagtggaacccttcagcagtctcggctactgtttagccaagctggacccaccagcatgtctcttcaagctaaaaactggctgcctggaccttgctacagacagcagcgtctgtcaaagcaggcaaacgacaacaacaacagcaactttccctggactgcggctacaaagtatcatctaaatggccgggactcgttggttaatccaggaccagctatggccagccacaaagacgatgaagaaaagtttttccccatgcatggaaccctgatatttggtaaacaaggaacaaatgctaacgacgcggatttggacaatgtcatgattacagatgaagaagaaatccgcaccaccaatcccgtggctacggagcagtacggatatgtgtcaaataatttgcaagactcaaatactggtccaactactggaactgtcaatcaccaaggagcgttacctggtatggtgtggcaggatcgagacgtgtacctgcagggacccatttgggccaagattcctcacaccgatggacactttcatccttctccacttatgggaggttttggactcaaacacccacctcctcagatcatgattaaaaacactcccgttccagccaatcctcccacaaacttcagttctgccaagtttgcttctttcatcacacagtattccacgggacaagtcagcgtagagatcgagtgggagctgcagaaggagaacagcaaacgctggaaccccgagatccagtacacttccaactataacaaatctgttaatgtggactttactgtggacactaatggtgtgtattcagagcctcgccccattggcaccagatacctgactcgtaatctgtaa

SEQ ID NO: 198 - protein, 738 aa, Adeno-associated virus
MAADGYLPDWLEDNLSEGIREWWDLKPGAPKPKANQQKQDDGRGLVLPGCKYLGPFNGLDKGEPVNAADAAALEHDKAYDQQLKAGDNPYLRYNHADAEFQERLQEDTSFGGNLGRAVFQAKKRVLEPLGLVEEGAKTAPGKKRPVEPSPQRSPDSSTGIGKTGQQPAKKRLNFGQTGDSESVPDPQPIGEPPAGPSGLGSGTMAAGGGAPMADNNEGADGVGSSSGNWHCDSTWLGDRVITTSTRTWALPTYNNHLYKQISNGTSGGSTNDNTYFGYSTPWGYFDFNRFHCHFSPRDWQRLINNNWGFRPKRLNFKLFNIQVKEVTQNEGTKTIANNLTSTIQVFTDSEYQLPYVLGSAHQGCPPPFPADVFMIPQYGYLTLNNGSQAVGRSSFYCLEYFPSQMRRTGNNFEFSYQFEDVPFHSSYAHSQSLDRLMNPLIDQYLYYLSRTQSTGGTAGTQQLLFSQAGPNNMSAQAKNWLPGPCYRQQRVSTTLSQNNNSNFAWTGATKYHLNGRDSLVNPGVAMATHKDDEERFFPSSGVLMFGKQGAGKDNVDYSSVMLTSEEEIKTTNPVATEQYGVVADNLQQQNAAPIVGAVNSQGALPGMVWQNRDVYLQGPIWAKIPHTDGNFHPSPLMGGFGLKHPPPQILIKNTPVPADPPTTFSQAKLASFITQYSTGQVSVEIEWELQKENSKRWNPEIQYTSNYNKSVNVDFTVDTNGVYSEPRPIGTRYLTRNL

SEQ ID NO: 199 - DNA, 2217 bp, Adeno-associated virus
atggctgccgatggttatcttccagattggctcgaggacaacctctctgagggcattcgcgagtggtgggacttgaaacctggagccccgaaacccaaagccaaccagcaaaagcaggacgacggccggggtctggtgcttcctggctgcaagtacctcggacccttcaacggactcgacaagggggagcccgtcaacgcggcggacgcagcggccctcgagcacgacaaggcctacgaccagcagctcaaagcgggtgacaatccgtacctgcggtataaccacgccgacgccgagtttcaggagcgtctgcaagaagatacgtcttttgggggcaacctcgggcgagcagtcttccaggccaagaagcgggttctcgaacctctcggtctggttgaggaaggcgctaagacggctcctggaaagaagagaccggtagagccatcaccccagcgttctccagactcctctacgggcatcggcaagacaggccagcagcccgcgaaaaagagactcaactttgggcagactggcgactcagagtcagtgcccgaccctcaaccaatcggagaaccccccgcaggcccctctggtctgggatctggtacaatggctgcaggcggtggcgctccaatggcagacaataacgaaggcgccgacggagtgggtagttcctcaggaaattggcattgcgattccacatggctgggcgacagagtcatcaccaccagcacccgaacctgggccctccccacctacaacaaccacctctacaagcaaatctccaacgggacatcgggaggaagcaccaacgacaacacctacttcggctacagcaccccctgggggtattttgactttaacagattccactgccacttctcaccacgtgactggcagcgactcatcaacaacaactggggattccggcccaagagactcaacttcaagctcttcaacatccaggtcaaggaggtcacgcagaatgaaggcaccaagaccatcgccaataaccttaccagcacgattcaggtctttacggactcggaataccagctcccgtacgtcctcggctctgcgcaccagggctgcccgcctccgttcccggcggacgtcttcatgattcctcagtacgggtacctgactctgaacaacggcagtcaggccgtgggccgttcctccttctactgcctggagtactttccttctcaaatgcggagaacgggcaacaactttgagttcagctaccagtttgaggacgtgccttttcacagcagctacgcgcatagccaaagcctggaccggctgatgaaccccctcatcgaccagtacctgtactacctgtctcggactcagtccacgggaggtaccgcaggaactcagcagttgctattttctcaggccgggcctaataacatgtcggctcaggccaaaaactggctacccgggccctgctaccggcagcaacgcgtctccacgacactgtcgcaaaataacaacagcaactttgcttggaccggtgccaccaagtatcatctgaatggcagagactctctggtaaatcccggtgtcgctatggcaacgcacaaggacgacgaagagcgattttttccatccagcggagtcttgatgtttgggaaacagggagctggaaaagacaacgtggactatagcagcgttatgctaaccagtgaggaagaaatcaaaaccaccaacccagtggccacagaacagtacggcgtggtggccgataacctgcaacagcaaaacgccgctcctattgtaggggccgtcaacagtcaaggagccttacctggcatggtctggcagaaccgggacgtgtacctgcagggtcctatctgggccaagattcctcacacggacggcaactttcatccttcgccgctgatgggaggctttggactgaaacacccgcctcctcagatcctgattaagaatacacctgttcccgcggatcctccaactaccttcagtcaagccaagctggcgtcgttcatcacgcagtacagcaccggacaggtcagcgtggaaattgaatgggagctgcagaaagagaacagcaagcgctggaacccagagattcagtatacttccaactataacaaatctgttaatgtggactttactgtggacactaatggtgtgtattcagagcctcgccccattggcaccagatacctgactcgtaatctgtaa

SEQ ID NO: 200 - DNA, 3167 bp, Adeno-associated virus
attgaatttagcggccgcgaattcgcccttcgcagagaccaaagttcaactgaaacgaattaaacggtttattgattaacaagcaattacagattacgagtcaggtacctggtgccaatggggcgaggctctgaatacacaccattagtgtccacagtaaagtccacattaacagatttgttgtagttggaagtgtactgaatctcgggattccagcgtttgctgttctccttctgcagctcccactcgatctccacgctgacctgccccgtggagtactgtgtaatgaaggaagcaaactttgccgcactgaaggtagtcgaaggattcgcaggtaccggggtgttcttgatgagaatctgcgggggagggtgtttaagtccgaatccgcccatgaggggagaggggtgaaaatgtccgtccgtgtgtggaatctttgcccagatgggcccctgcaggtacacgtctctgtcctgccacaccatgcctggaagaacgccttgtgtgttgacatctgaggtagctgcttgtgtgttgccgctctggaggttggtagatacagaaccatactgctccgtagccacgggattggtggtcctgatttcctcttcgtctgtaatcatgaccttttcaatgtccacattagtttttcccgagtcttgttttccaaagatgagaaccccgctctgaggaaaaaacttttcttcatcgtccttgtggctggccatggccgggcccggattcaccagagagtctcttccattaaggtggtacttggtagctccagtccacgagtattcactgttgttgttatccgcagatgtctttgatactcgctgctggcggtaacagggtccaggaagccagttcctagactggtcccgaatgtcacttgctccggcctgagaaaactgaagccttgactgcgtggtggttccgcttggagtgtttgttctgctcaagtaatacaggtactggtcgatgagaggattcatgagacggtccaaactctggctgtgggcgtagctgctgtggaaaggaacgtcctcaaaggtgtagctgaaggtaaagttgtttccggtacgcagcatctgagaaggaaagtactccaggcagtaaaatgaagagcgtcctactgcctgactcccgttgttcagggtgaggtatccatactgtggcaccatgaagacgtctgctgggaacggcgggaggcatccttgatgcgccgagccgaggacgtacgggagctggtactccgagtcagtaaacacctgaaccgtgctggtaaggttattggcaatcgtcgtcgtaccgtcattctgcgtgacctccttgacttgaatgttaaagagcttgaagttgagtcttttgggccggaatccccaattgttgttgatgagtctttgccagtcacgtggcgaaaagtggcagtggaatctgttgaagtcaaaatacccccaaggggtgctgtagccaaagtagtggttgtcgtttgaggctcctgattggctggaaatctgcttgtagaggtggttgttgtaggtgggcagagcccaggtgcgggtgctggtggtgatgactctgtcgcccatccatgtggaatcgcaatgccaatttcccgaggaattacccactccgtcggcgccctcgttattgtctgccattggtgcgccactgcctgtagccatcgtattagttcccagaccagagggggctgctggtggctgtccgagaggctgggggtcaggtacggagtctgcgtctccagtctgaccgaaattcaatctctttcttgcaggctgctggcccgcttttccggttcccgaggaggagtctggctccgcaggagagtgctctaccggcctcttttttcccggagccgtcttaacaggttcctcaaccaggcccagaggttcaagaaccctctttttcgcctggaagactgctcgtccgaggttgcccccaaaagacgtatcttctttaagacgctcctggaactccgcgtcggcgtggttgtacttggggtacgggttgtctccgctgtcgagctgccggtcgtaggccttgtcgtgctcgagggccgcggcgtctgcctcgttgaccggctctcccttgtcgagtccgttgaagggtccaaggtacttgtacccaggaagcacaagacccctgctgtcgtccttatgccgctctgcgggctttggtggtggtgggccaggtttgagcttccaccactgtcttattccttcagagagagtgtcctcgagccaatctggaagataaccatcggcagccatacctgatttaaatcatttattgttcagagatgcagtcatccaaatccacattgaccagatcgcaagcagtgcaagcgtctggcacctttcccatgatatgatgaatgtagcacagtttctgatacgcctttttgacgacagaaacgggttgagattctgacacgggaaagcactctaaacagtctttctgtccgtgagtgaagcagatatttgaattctgattcattctctcgcattgtctgcagggaaacagcatcagattcatgcccacgtgacgagaacatttgttttggtacctgtccgcgtagttgattgaagcttccgcgtctgacgtcgatggctgcgcaactgactcgcgcgcccgtttgggctcacttatatctgcgtcactgggggcgggtctttttttggctccaccctttttgacgtagaattcatgctctacctcaaccacgtgatcctttgcccaccggaaaaagtctttgacttcctgcttggtgaccttcccaaagtcatgatccagacggcgggtgagttcaaatttgaacatccggtcttgcaacggctgctggtgttcgaaggtcgttgagttcccgtcaatcactgcgcacatgttggtgttggaggtgacaatcacgggagtcgggtctatctgggccgaggacttgcatttctggtccacgcgcaccttgcttcctccgagaatggctttggccgactccacgaccttggcggtcatcttcccctcctcccaccagatcaccatcttgtcgacgcaatcattgaaaggaaagttctcattggtccagttgacgcagccgtagaaagggcgaattcgtttaaacctgcaggactagtccctttagtgagggt

SEQ ID NO: 201 - DNA, 3161 bp, Adeno-associated virus
aattgaatttagcggccgcgaattcgcccttcgcagagaccaaagttcaactgaaacgaattaaacggtttattgattaacaagcaattacagattacgagtcaggtatctggtgccaatggggcgaggctctgaatacacaccattagtgtccacagtaaagtccacattaacagatttgttgtagttggaagtgtactgaatctcgggattccagcgtttgctgttctccttctgcagctcccactcgatctccacgctgacctgccccgtggagtactgtgtaatgaaggaagcaaactttgccgcactgaaggtagtcgaaggattcgcaggtaccggggtgttcttgatgagaatctgcgggggagggtgtttaagtccgaatccgcccatgaggggagaggggtgaaaatgtccgtccgtgtgtggaatctttgcccagatgggcccctgcaggtacacgtctctgtcctgccacaccatgcctggaagaacgccttgtgtgttgacatctgaggtagctgcttgtgtgttgccgctctggaggttggtagatacagaaccatactgctccgtagccacgggattggtggtcctgatttcctcttcgtctgtaatcatgaccttttcaatgtccacattagtttttcccgagtcttgttttccaaagatgagaaccccgctctgaggaaaaaacttttcttcatcgtccttgtggctggccatggccgggcccggattcaccagagagtctcttccattaaggtggtacttggtagctccagtccacgagtattcactgttgttgttatccgcagatgtctttgatactcgctgctggcggtaacagggtccaggaagccagttcctagactggtcccgaatgtcacttgctccggcctgagaaaactgaagccttgactgcgtggtggttccgcttggagtgtttgttctgctcaagtaatacaggtactggtcgacgagaggattcatgagacggtccaaactctggctgtgggcgtagctgctgtggaaaggaacgtcctcaaaggtgtagctgaaggtaaagttgtttccggtacgcagcatctgagaaggaaagtactccaggcagtaaaatgaagagcgtcctactgcctgactcccgttgttcagggtgaggtatccatactgtggcaccatgaagacgtctgctgggaacggcgggaggcatccttgatgcgccgagccgaggacgtacgggagctggtactccgagtcagtaaacacctgaaccgtgctggtaaggttattggcaatcgtcgtcgtaccgtcattctgcgtgacctccttgacttgaatgttaaagagcttgaagttgagtcttttgggccgggatccccaattgttgttgatgagtctttgccagtcacgtggcgaaaagtggcagtggaatctgttgaagtcaaaatacccccaaggggtgctgtagccaaagtagtggttgtcgtttgaggctcctgattggctggaaatctgcctgtagaggtggttgttgtaggtgggcagagcccaggtgcgggtgctggtggtgatgactctgtcgcccatccatgtggaatcgcaatgccaatttcccgaggaattacccactccgtcggcgccctcgttattgtctgccattggtgcgccactgcctgtagccatcgtattagttcccagaccagagggggctgctggtggctgtccgagaggctgggggtcaggtacggagtctgcgtctccagtctgaccgaaattcaatctccttcttgcaggctgctggcccgcttttccggttcccgaggaggagtctggctccgcaagagagtgctctaccggcctcttttttcccggagccgtcttaacaggttcctcaaccaggcccagaggttcaagaaccctctttttcgcctggaagactgctcgtccgaggttgcccccaaaagacgtatcttctttaagacgctcctggaactccgcgtcggcgtggttgtacttgaggtacgggttgtctccgccgtcgagctgccggtcgtaggccttgtcgtgctcgagggccgcggcgtctgcctcgttgaccggctctcccttgtcgagtccgttgaagggtccaaggtacttgtacccaggaagcacaagacccctgctgtcgtccttatgccgctctgcgggctttggtggtggtgggccaggtttgagcttccaccactgtcttattccttcagagagagtgtcctcgagccaatctggaagataaccatcggcagccatacctgatttaaatcatttattgttcagagatgcagtcatccaaatccacattgaccagatcgcaagcagtgcaagcgtctggcacctttcccatgatatgatgaatgtagcacagtttctgatacgcctttttgacgacagaaacgggttgagattctgacacgggaaagcactctaaacagtctttctgtccgtgagtgaagcagatatttgaattctgattcattctctcgcattgtctgcagggaaacagcatcagattcatgcccacgtgacgagaacatttgttttggtacctgtccgcgtagttgattgaagcttccgcgtctgacgtcgatggctgcgcaactgactcgcgcgcccgtttgggctcacttatatctgcgtcactgggggcgggtctttttttggctccaccctttttgacgtagaattcatgctctacctcaaccacgtgatcctttgcccaccggaaaaagtctttgacttcctgcttggtgaccttcccaaagtcatgatccagacggcgggtgagttcaaatttgaacatccggtcttgcaacggctgctggtgttcgaaggtcgttgagttcccgtcaatcactgcgcacatgttggtgttggaggtgacaatcacgggagtcgggtctatctgggccgaggacttgcatttctggtccacgcgcaccttgcttcctccgagaatggctttggccgactccacgaccttggcggtcatcttcccctcctcccaccagatcaccatcttgtcgacgcaatcattgaaaggaaagttctcattggtccagttgacgcagcaagggcgaattcgtttaaacctgcaggactagtccctttagtgaggg

SEQ ID NO: 202 - DNA, 3172 bp, Adeno-associated virus
gattgaatttagcggccgcgaattcgcccttgctgcgtcaactggaccaatgagaactttcccttcaacgattgcgtcgacaagatggtgatctggtgggaggagggcaagatgaccgccaaggtcgtggagtccgccaaggccattctgggtggaagcaaggtgcgcgtggaccaaaagtgcaagtcatcggcccagatcgaccccacgcccgtgatcgtcacctccaacaccaacatgtgcgccgtgatcgacgggaacagcaccaccttcgagcaccagcagcccctgcaggaccgcatgttcaagttcgagctcacccgccgtctggagcacgactttggcaaggtgaccaagcaggaagtcaaagagttcttccgctgggctcaggatcacgtgactgaggtggcgcatgagttctacgtcagaaagggcggagccaccaaaagacccgcccccagtgacgcggatataagcgagcccaagcgggcctgcccctcagttgcggagccatcgacgtcagacgcggaagcaccggtggactttgcggacaggtaccaaaacaaatgttctcgtcacgcgggcatgcttcagatgctgtttccctgcaagacatgcgagagaatgaatcagaatttcaacgtctgcttcacgcacggggtcagagactgctcagagtgcttccccggcgcgtcggaatctcaacccgtcgtcagaaaaaagacgtatcagaaactgtgcgcgattcatcatctgctggggcgggcacccgagattgcgtgttcggcctgcgatctcgtcaacgtggacttggatgactgtgtttctgagcaataaatgacttaaaccaggtatggctgctgacggttatcttccagattggctcgaggacaacctctctgagggcattcgcgagtggtgggacctgaaacctggagcccccaagcccaaggccaaccagcagaagcaggacgacggccggggtctggtgcttcctggctacaagtacctcggacccttcaacggactcgacaagggggagcccgtcaacgcggcggacgcagcggccctcgagcacgacaaggcctacgaccagcagctcaaagcgggtgacaatccgtacctgcggtataaccacgccgacgccgagtttcaggagcgtctgcaagaagatacgtcttttgggggcaacctcgggcgagcagtcttccaggccaagaagcgggttctcgaacctctcggtctggttgaggaagctgctaagacggctcctggaaagaagagaccggtagaaccgtcacctcagcgttcccccgactcctccgcgggcatcggcaagaaaggccagcagcccgctaaaaagagactgaactttggtcagactggcgactcagagtcagtccccgaccctcaaccaatcggagaaccaccagcaggcccctctggtctgggatctggtacaatggctgcaggcggtggcgctccaatggcagacaataacgaaggcgccgacggagtgggtagttcctcaggaaattggcattgcgattccacatggctgggcgacagagtcatcaccaccagcacccgaacctgggccctgcccacctacaacaaccacctctacaagcaaatatccaatgggacatcgggaggaagcaccaacgacaacacctacttcggctacagcaccccctgggggtattttgacttcaacagattccactgccacttctcaccacgtgactggcagcgactcatcaacaacaactggggattccggccaaaaagactcagcttcaagctcttcaacatccaggtcaaggaggtcacgcagaatgaaggcaccgagaccatcgccaataaccttaccagcacgattcaggtatttacggactcggaataccagctgccgtacgtcctcggctccgcgcaccagggctgcctgcctccgttcccggcggacgtcttcatgattccccagtacggctaccttacactgaacaatggaagtcaagccgtaggccgttcctccttctactgcctggaatattttccatctcaaatgctgcgaactggaaacaattttgaattcagctacaccttcgaggacgtgcctttccacagcagctgcgcacacagccagagctcggaccgactgatgaatcctctcatcgaccagtacctgtactacttatccagaactcggtccacaggaggaactcaaggtacccagcaattgttattttctcaagctgggcctgcaaacatgtcggctcaggctaagaactggctacctggaccttgctaccggcagcagcgagtctctacgacactgtcgcaaaacaacaacagcaactttgcttggactggtgccaccaaatatcacctgaacggaagagactctttggtaaatcccggtgtcgccatggcaacccacaaggacgacgaggaacgcttcttcccgtcgagtggagtcctgatgtttggaaaacagggtgctggaagagacaatgtggactacagcagcgttatgctaaccagcgaagaagaaattaaaaccactaaccctgtagccacagaacaatacggtgtggtggctgacaacttgcagcaaaccaatacagggcctattgtgggaaatgtcaacagccaaggagccttacctggcatggtctggcagaaccgagacgtgtacctgcagggtcccatctgggccaagattcctcacacggacggcaacttccacccttcaccgctaatgggaggatttggactgaagcacccacctcctcagatcctgatcaagaacacgccggtacctgcggatcctccaacaacgttcagccaggcgaaattggcttccttcattacgcagtacagcaccggacaggtcagcgtggaaatcgagtgggagctgcagaaggagaacagcaaacgctggaacccagagattcagtacacttcaaactactacaaatctacaaatgtggactttgctgtcaatacagagggaacttattctgagcctcgccccattggtactcgttacctcacccgtaatctgtaattgctggttaatcaataaaccgtttgattcgtttcagttgaactttggtctctgcgaagggcgaattcgtttaaacctgcaggactagtccctttagtgagg

SEQ ID NO: 203 - DNA, 3172 bp, Adeno-associated virus
gattgaatttagcggccgcgaattcgcccttgctgcgtcaactggaccaatgagaactttcccttcaacgattgcgtcgacaagatggtgatctggtgggaggagggcaagatgaccgccaaggtcgtggagtccgccaaggccattctgggtggaagcaaggtgcgcgtggaccaaaagtgcaagtcatcggcccagatcgaccccacgcccgtgatcgtcacctccaacaccaacatgtgcgccgtgatcggcgggaacagcaccaccttcgagcaccagcagcccctgcaggaccgcatgttcaagttcgagctcacccgccgtctggagcacgactttggcaaggtgaccaagcaggaagtcaaagagttcttccgctgggctcaggatcacgtgactgaggtggcgcatgagttctacgtcagaaagggcggagccaccaaaagacccgcccccagtgacgcggatataagcgagcccaagcgggcctgcccctcagttgcggagccatcgacgtcagacgcggaagcaccggtggactttgcggacaggtaccaaaacaaatgttctcgtcacgcgggcatgcttcagatgctgtttccctgcaagacatgcgagagaatgaatcagaatttcaacgtctgcttcacgcacggggtcagagactgctcagagtgcctccccggcgcgtcagaatctcaacccgtcgtcagaaaaaagacgtatcagaaactgtgcgcgattcatcatctgctggggcgggcacccgagattgcgtgttcggcctgcgatctcgtcaacgtggacttggatgactgtgtttctgagcaataaatgacttaaaccaggtatggctgctgacggttatcttccagattggctcgaggacaacctctctgagggcattcgcgagtggtgggacctgaaacctggagcccccaagcccaaggccaaccagcagaagcaggacgacggccggggtctggtgcttcttggctacaagtacctcggacccttcaacggactcgacaagggggagcccgtcaatgcggcggacgcagcggccctcgagcacgacaaggcctacgaccagcagctcaaagcgggtgacaatccgtacctgcggtataaccacgccgacgccgagtttcaggagcgtctgcaagaagatacgtcttttgggggcaacctcgggcgagcagtcttccaggccaagaagcgggttctcgaacctctcggtctggttgaggaagctgctaagacggctcctggaaagaagagaccggtagaaccgtcacctcagcgttcccccgactcctccacgggcatcggcaagaaaggccagcagcccgctaaaaagagactgaactttggtcagactggcgactcagagtcagtccccgaccctcaaccaatcggagaaccaccagcaggcccctctggtctgggatctggtacaatggctgcaggcggtggcgctccaatggcagacaataacgaaggcgccgacggagtgggtagttcctcaggaaattggcattgcgattccacatggctgggcgacagagtcatcaccaccagcacccgaacctgggccctgcccacctacaacaaccacctctacaagcaaatatccaatgggacatcgggaggaagcaccaacgacaacacctacttcggctacagcaccccctgggggtattttgacttcaacagattccactgccacttctcaccacgtgactggcagcgactcatcaacaacaactggggattccggccaaaaagactcagcttcaagctcttcaacatccaggtcaaggaggtcacgcagaatgaaggcaccaagaccatcgccaataaccttaccagcacgattcaggtatttacggactcggaataccagctgccgtacgtcctcggctccgcgcaccagggctgcctgcctccgttcccggcggacgtcttcatgattccccagtacggctaccttacactgaacaatggaagtcaagccgtaggccgttcctccttctactgcctggaatattttccatctcaaatgctgcgaactggaaacaattttgaattcagctacaccttcgaggacgtgcctttccacagcggctacgcacacagccagagcttggaccgactgatgaatcctctcatcgaccagtacctgtactacttatccagaactcagtccacaggaggaactcaaggtacccagcaattgttattttctcaagctgggcctgcaaacatgtcggctcaggctaagaactggctacctggaccttgctaccggcagcagcgagtctctacgacactgtcgcaaaacaacaacagcaactttgcttggactggtgccaccaaatatcacctgaacggaagagactctttggtaaatcccggtgtcgccatggcaacccacaaggacgacgaggaacgcttcttcccgtcgagtggagtcctgatgtttggaaaacagggtgctggaagagacaatgtggactacagcagcgttatgctaaccagcgaagaagaaattaaaaccactaaccctgtagccacagaacaatacggtgtggtggctgacaacttgcagcaaaccaatacagggcctattgtgggaaatgtcaacagccaaggagccttacctggcatggtctggcagaaccgagacgtgtacctgcagggtcccatctgggccaagattcctcacacggacggcaacttccacccttcaccgctaatgggaggatttggactgaagcacccacctcctcagatcctgatcaagaacacgccggtacctgcggatcctccaacgacgttcagccaggcgaaattggcttccttcattacgcagtacagcaccggacaggtcagcgtggaaatcgagtgggagctgcagaaggagaacagcaaacgctggaacccagagattcagtacacttcaaactactacaaatctacaaatgtggactttgctgtcaatacagagggaacttattctgagcctcgccccattggtactcgttacctcacccgtaatctgtaattgctggttaatcaataaaccgtttgattcgtttcagttgaactttggtctctgcgaagggcgaattcgtttaaacctgcaggactagtccctttagtgagg

SEQ ID NO: 204 - DNA, 2208 bp, Adeno-associated virus
atggctgccgatggttatcttccagattggctcgaggacactctctctgaaggaataagacagtggtggaagctcaaacctggcccaccaccaccaaagcccgcagagcggcataaggacgacagcaggggtcttgtgcttcctgggtacaagtacctcggacccttcaacggactcgacaagggagagccggtcaacgaggcagacgccgcggccctcgagcacgacaaggcctacgaccggcagctcgaaagcggagacaacccgtacctcaagtacaaccacgccgacgcggagtttcaggagcgtcttaaagaagatacgtcttttgggggcaacctcggacgagcagtcttccaggcgaaaaagagggttcttgaacctctgggcctggttgaggagcctgttaaaacggctccgggaaaaaagaggccggtagagcactctcctgtggagccagactcctcctcgggaaccggaaaagcgggccagcagcctgcgagaaaaagattgaattttggtcagactggagacgcagactccgtacctgacccccagcctctcggacagccaccagcagccccctctggtctgggatctactacaatggcttcaggcagtggcgcaccagtggcagacaataacgagggtgccgatggagtgggtaattcctcaggaaattggcattgcgattcccaatggctgggcgacagagtcatcaccaccagcacccgaacctgggccctgcccacctacaacaaccacctctacaagcaaatctccagccaatcaggagcctcaaacgacaaccactactttggctacagcaccccctgggggtattttgacttcaacagattccactgccacttttcaccacgtgactggcaaagactcatcaacaacagctggggattccgacccaaaagactcaacttcaagctctttaacattcaagtcaaagaggtcacgcagaatgacggtacgacgacgattgccaataaccttaccagcacggttcaagtgtttaccgactcggagtaccagctcccgtacgtcctcggctcggcgcatcaaggatgcctcccgccgttcccagcagacgtctttatggtcccacagtatggatacctcaccctgaacaacgggagtcaggcggtaggacgctcttccttttactgcctggagtactttccttctcagatgctgcgtactggaaacaactttcagttcagctacacctttgaagacgttcccttccacagcagctacgctcacagccagagtctggatcggctgctgaatcctctgatcgaccagtacctatattatctgaacaagacacaatcaaatagtggaactcttcagcagtctcggctactgtttagccaagctggacccaccagcatgtctcttcaagctaaaaactggctgcctggaccttgctacagacagcagcgtctgtcaaagcaggcaaacgacaacaacaacagcaactttccctggactgcggctacaaagtatcatctaaatggccgggactcgttggttaatccaggaccagctatggccagccacaaagacgatgaagaaaagtttttccccatgcatggaaccctgatatttggtaaacaaggaacaaatgctaacgacgcggatttggacaatgtcatgattacagatgaagaagaaatccgcaccaccaatcccgtggctacggagcagtacggatatgtgtcaaataatttgcaaaactcaaatactggtccaactactggaactgtcaatcaccaaggagcgttacctggtatggtgtggcaggatcgagacgtgtacctgcagggacccatttgggccaagattcctcacacggacgggcactttcatccttctccactaatgggaggttttgggctcaaacacccgcctcctcagatcatgatcaaaaacactcccgttccagccaatcctcctacaaacttcagttcttccaagtttgcttctttcatcacacagtattccacggggcaggtcagcgtggagatcgagtgggagctgcagaaggagaacagcaaacgctggaatcccgaaattcagtatacttccaactacaacaaatctgttaatgtggactttactgtggacactaatggtgtgtattcagagcctcgccccattggcaccagatacccgactcgtaatctgtaa

SEQ ID NO: 205 - protein, 735 aa, Adeno-associated virus
MAADGYLPDWLEDTLSEGIRQWWKLKPGPPPPKPAERHKDDSRGLVLPGYKYLGPFNGLDKGEPVNEADAAALEHDKAYDRQLESGDNPYLKYNHADAEFQERLKEDTSFGGNLGRAVFQAKKRVLEPLGLVEEPVKTAPGKKRPVEHSPVEPDSSSGTGKAGQQPARKRLNFGQTGDADSVPDPQPLGQPPAAPSGLGSTTMASGSGAPVADNNEGADGVGNSSGNWHCDSQWLGDRVITTSTRTWALPTYNNHLYKQISSQSGASNDNHYFGYSTPWGYFDFNRFHCHFSPRDWQRLINNSWGFRPKRLNFKLFNIQVKEVTQNDGTTTIANNLTSTVQVFTDSEYQLPYVLGSAHQGCLPPFPADVFMVPQYGYLTLNNGSQAVGRSSFYCLEYFPSQMLRTGNNFQFSYTFEDVPFHSSYAHSQSLDRLLNPLIDQYLYYLNKTQSNSGTLQQSRLLFSQAGPTSMSLQAKNWLPGPCYRQQRLSKQANDNNNSNFPWTAATKYHLNGRDSLVNPGPAMASHKDDEEKFFPMHGTLIFGKQGTNANDADLDNVMITDEEEIRTTNPVATEQYGYVSNNLQNSNTGPTTGTVNHQGALPGMVWQDRDVYLQGPIWAKIPHTDGHFHPSPLMGGFGLKHPPPQIMIKNTPVPANPPTNFSSSKFASFITQYSTGQVSVEIEWELQKENSKRWNPEIQYTSNYNKSVNVDFTVDTNGVYSEPRPIGTRYPTRNL

SEQ ID NO: 206 - DNA, 2208 bp, Adeno-associated virus
atggctgccgatggttatcttccagattggctcgaggacactctctctgaaggaataagacagtggtggaagctcaaacctggcccaccaccaccaaagcccgcagagcggcataaggacgacagcaggggtcttgtgcttcctgggtacaagtacctcggacccttcaacggactcgacaagggagagccggtcaacgaggcagacgccgcggccctcgagcacgacaaggcctacgaccggcagctcgacagcggagacaacccgtacctcaagtacaaccacgccgacgcggagtttcaggagcgtcttaaagaagatacgtcttttgggggcaacctcggacgagcagtcttccaggccaaaaagaggattcttgaacctctgggcctggttgaggaacctgttaagacggctccgggagaaaagaggccggtagagcactctcctgcggagccagactcctcctcgggaaccggaaaagcgggccagcagcctgcaagaaagagattgaattttggccagactggagacgcagactcagtacctgacccccagcctctcggacagccaccagcagccccctctggtctgggaactaatacgatggcttcaggcagtggcgcaccaatggcagacaataacgagggcgccgacggagtgggtaattcctcgggaaattggtattgcgattccacatggatgggcgacagagtcatcaccaccagcacccgcacctgggccctgcccacctacaacaaccatctgtacaagcaaatctccagccagtctggagccagcaacgacaaccactactttggctacagcaccccctgggggtattttgacttcaacagattccactgccacttctccccacgtgactggcaaagactcatcaacaacaactggggattccggcccaagagactcagcttcaagctctttaacattcaagtcaaagaggtcacgcagaatgacggtacgacgacgattgccaataaccttaccagcacggttcaggtgtttactgactcggagtaccagctcccgtacgtcctcggctcggcgcatcaaggatgcctcccgccgttcccagcagacgtcttcatggtgccacagtatggatacctcaccctgaacaacggcagtcaggcggtaggacgctcttccttttactgcctggagtactttccttctcagatgcttcgtaccggaaacaactttaccttcagctacacctttgaagacgttcctttccatagcagctacgctcacagccaaagtctggaccgtctcatgaatcctctcatcgaccagtacctgtattacttgagcagaacaaacactccaagcggaaccaccacgatgtccaggcttcagttttctcaggccggagcaagtgacattcgggaccagtctagaaactggcttcctggaccctgttaccgccagcagcgagtatcaaagacagctgcggacaacaacaacagtgattactcgtggactggagctaccaagtaccacctcaatggaagagactctctggtgaatccgggcccagctatggccagccacaaggacgatgaagaaaaatattttcctcagagcggggttctcatctttggaaaacaagactcgggaaaaactaatgtggacattgaaaaggttatgattacagacgaagaggaaatcaggaccaccaatcccgtggctacggagcagtatggttctgtatctaccaacctccagagcggcaacacacaagcagctacctcagatgtcaacacacaaggcgttcttccaggcatggtctggcaggacagagacgtgtacctgcaggggcccatctgggcaaagattccacacacggacggacattttcacccctctcccctcgtgggcggattcggacttaaacaccctcctccacaaattctcatcaagaacaccccggtacctgcgaatccttcgaccactttcagtgcggcaaagtttgcttccttcatcacacagtactccacggggcaggtcagcgtggagatcgagtgggagctgcagaaggagaacagcaaacgctggaatcccgaaattcagtacacttccaactacaacaaatctgttaatgtggactttactgtggacactaatggtgtgtattcagagcctcgccccattggcaccagatacctgactcgtaatctgtaa

SEQ ID NO: 207 - protein, 735 aa, Adeno-associated virus
MAADGYLPDWLEDTLSEGIRQWWKLKPGPPPPKPAERHKDDSRGLVLPGYKYLGPFNGLDKGEPVNEADAAALEHDKAYDRQLDSGDNPYLKYNHADAEFQERLKEDTSFGGNLGRAVFQAKKRILEPLGLVEEPVKTAPGEKRPVEHSPAEPDSSSGTGKAGQQPARKRLNFGQTGDADSVPDPQPLGQPPAAPSGLGTNTMASGSGAPMADNNEGADGVGNSSGNWYCDSTWMGDRVITTSTRTWALPTYNNHLYKQISSQSGASNDNHYFGYSTPWGYFDFNRFHCHFSPRDWQRLINNNWGFRPKRLSFKLFNIQVKEVTQNDGTTTIANNLTSTVQVFTDSEYQLPYVLGSAHQGCLPPFPADVFMVPQYGYLTLNNGSQAVGRSSFYCLEYFPSQMLRTGNNFTFSYTFEDVPFHSSYAHSQSLDRLMNPLIDQYLYYLSRTNTPSGTTTMSRLQFSQAGASDIRDQSRNWLPGPCYRQQRVSKTAADNNNSDYSWTGATKYHLNGRDSLVNPGPAMASHKDDEEKYFPQSGVLIFGKQDSGKTNVDIEKVMITDEEEIRTTNPVATEQYGSVSTNLQSGNTQAATSDVNTQGVLPGMVWQDRDVYLQGPIWAKIPHTDGHFHPSPLVGGFGLKHPPPQILIKNTPVPANPSTTFSAAKFASFITQYSTGQVSVEIEWELQKENSKRWNPEIQYTSNYNKSVNVDFTVDTNGVYSEPRPIGTRYLTRNL

SEQ ID NO: 208 - DNA, 2209 bp, Adeno-associated virus
atggctgccgatggttatcctccagattggctcgaggacactctctctgaagggataagacagtggtggaagctcaaacctggcccaccaccaccaaagcccgcagagcggcataaggacgacagcaggggtcttgtgcttcctgggtacaagtacctcggacccttcaacggactcgacaagggggagccggtcaacgaggcagacgccgcggccctcgagcacgacaaggcctacgaccggcagctcgacagcggagacaacccgtacctcaagtacaaccacgccgacgcagagtttcaggagcgccttaaagaagatacgtcttttgggggcaacctcggacgagcagtcttccaggcgaaaaagagggttcttgaacctctgggcctggttgaggaacctgttaagacggctccgggaaaaaagaggccggtagagcactctcctgtggagccagactcctcctcgggaaccggaaaagcgggccagcggcctgcaagaaaaagattaaattttggtcagactggagacgcagactccgtacctgacccccagcctctcggacagccaccagcagccccctctggtctgggatctactacaatggctacaggcagtggcgcaccaatggcagacaataacgagggtgccgatggagtgggtaattcctcaggaaattggcattgcgattcccaatggctgggcgacagagtcatcaccaccagcacccgaacctgggccctgcccacatacaacaaccacctctacaagcaaatctccagccaatcaggagccagcaacgacaaccactactttggctacagcaccccctgggggtattttgacttcaacagattccactgccacttttcaccacgtgactggcaaagactcatcaacaacaactggggattccggcccaaaagactcaacttcaagctctttaatattcaagtcaaagaggtcacgcagaatgacggtacgacgacgattgccaataaccttaccagcacggttcaggtgtttactgactcggagtaccagctcccgtacgtcctgggctcggcgcatcaaggatgcctcccgccgtttccagcggacgtcttcatggtcccacagtatggatacctcaccctgaacaacgggagtcaggcggtaggacgctcttccttttactgcctggagtactttccttctcagatgctgcgtactggaaacaactttcagttcagctacacttttgaagacgtgcctttccacagcagctacgctcacagccagagtctggatcggctgatgaatcctctgatcgaccagtacctgtattatctgaacaagacacaaacaaatagtggaactcttcagcagtctcggctactgtttagccaagctggaccaaccaacatgtctcttcaagctaaaaactggctgcctggaccttgctacagacagcagcgtctgtcaaaacaggcaaacgacaacaacaacagcaactttccctggactgcagctacaaagtatcatctaaatggccgggactcgttggttaatccaggaccagctatggccagtcacaaggatgacgaagaaaagtttttccccatgcatggaaccctgatatttggtaaacaaggaacaaatgccaacgacgcggatttggaaaatgtcatgattacagatgaagaagaaatcagggccaccaatcccgtggctacggagcagtacgggactgtgtcaaataatttgcaaaactcaaacactggtccaactactggaactgtcaatcgccaaggagcgttacctggtatggtgtggcaggatcgagacgtgtacctgcagggacccatttgggccaagattcctcacaccgatggacactttcatccttctccactgatgggaggttttggactcaaacacccgcctcctcagatcatgatcaaaaacactcccgttccagccaatcctcccacaaacttcagttctgccaagtttgcttctttcatcacacagtattccacgggacaggtcagcgtggagatcgagtgggagctgcagaaggagaacagcaaacgctggaatcccgaaattcagtacacttccaactacaacaagtctgttaatgtggactttactgtggacactaatggtgtgtattcagagcctcgccccattggcaccagatacctgactcgtaatctgtaat

SEQ ID NO: 209 - protein, 735 aa, Adeno-associated virus
MAADGYPPDWLEDTLSEGIRQWWKLKPGPPPPKPAERHKDDSRGLVLPGYKYLGPFNGLDKGEPVNEADAAALEHDKAYDRQLDSGDNPYLKYNHADAEFQERLKEDTSFGGNLGRAVFQAKKRVLEPLGLVEEPVKTAPGKKRPVEHSPVEPDSSSGTGKAGQRPARKRLNFGQTGDADSVPDPQPLGQPPAAPSGLGSTTMATGSGAPMADNNEGADGVGNSSGNWHCDSQWLGDRVITTSTRTWALPTYNNHLYKQISSQSGASNDNHYFGYSTPWGYFDFNRFHCHFSPRDWQRLINNNWGFRPKRLNFKLFNIQVKEVTQNDGTTTIANNLTSTVQVFTDSEYQLPYVLGSAHQGCLPPFPADVFMVPQYGYLTLNNGSQAVGRSSFYCLEYFPSQMLRTGNNFQFSYTFEDVPFHSSYAHSQSLDRLMNPLIDQYLYYLNKTQTNSGTLQQSRLLFSQAGPTNMSLQAKNWLPGPCYRQQRLSKQANDNNNSNFPWTAATKYHLNGRDSLVNPGPAMASHKDDEEKFFPMHGTLIFGKQGTNANDADLENVMITDEEEIRATNPVATEQYGTVSNNLQNSNTGPTTGTVNRQGALPGMVWQDRDVYLQGPIWAKIPHTDGHFHPSPLMGGFGLKHPPPQIMIKNTPVPANPPTNFSSAKFASFITQYSTGQVSVEIEWELQKENSKRWNPEIQYTSNYNKSVNVDFTVDTNGVYSEPRPIGTRYLTRNL

SEQ ID NO: 210 - DNA, 2208 bp, Adeno-associated virus
atggctgccgatggttatcttccagattggctcgaggacactctctctgaaggaataagacagtggtggaagctcaaacctggcccaccaccaccaaagcccgcagagcggcataaggacgacagcaggggtcttgtgcttcctgggtacaggtacctcggacccttcaacggactcgacaagggagagccggtcaacgaggcagacgccgcggccctcgagcacgacaaggcctacgaccggcagctcgacagcggagacaacccgtacctcaagtacaaccacgtcgacgcggagtttcaggagcgtcttaaagaagatacgtcttttgggggcaacctcggacgagcagtcttccaggccaaaaagaggattcttgaacctctgggcctggttgaggaacctgttaaggcggctccgggagaaaagaggccggtagagcactctcctgcggagccagactcctcctcgggaaccggaaaagcgggccagcagcctgcaagaaagagattgaattttggtcagactggagacgcagactcagtacctgacccccagcctctcggacagccaccagcagccccctctggtctgggaactaatacgatggcttcaggcagtggcgcaccaatggcagacaataacgagggcgccgacggagtgggtaattcctcgggaaattggcattgcgattccacatggatgggcgacagagtcatcaccaccagcacccgcacctgggccctgcccacctacaacaaccatctgtacaagcaaatctccagccagtctggagccagcaacgacaaccactactttggctacagcaccccctgggggcattttgacttcaacagattccactgccacttctccccacgtgactggcaaagactcatcaacaacaactggggattccggcccaagagactcagcttcaagctctttaacattcaagtcaaagaggtcacgcagaatgacggtacgacgacgattgccaataaccttaccagcacggttcaggtgtttactgactcggagtaccagctcccgtacgtcctcggctcggcgcatcaaggatgcctcccgccgttcccagcagacgtcttcatggtgccacagtatggatacctcaccctgaacaacggcagtcaggcggtaggacgctcttccttttactgcctggagtactttccttctcagatgcttcgtaccggaaacaactttaccttcagctacacctttgaagacgttcctttccatagcagctacgctcacagccaaagtctggaccgtctcatgaatcctctcatcgaccagtacctgtattacttgagcagaacaaacactccaagcggaaccaccacgatgtccaggcttcagttttctcaggccggagcaagtgacattcgggaccagtctagaaactggcttcctggaccctgttaccgccagcagcgagtatcaaagacagctgcggacaacaacaacagtgattactcgtggactggagctaccaagtaccacctcaatggaagagactctctggtgaatccgggcccagctatggccagccacaaggacgatgaagaaaaatattttcctcagagcggggttctcatctttggaaaacaagactcgggaaaaactaatgtggacattgaaaaggttatgattacagacgaagaggaaatcaggaccaccaatcccgtggctacggagcagtatggttctgtatctaccaacctccagagcggcaacacacaagcagctacctcagatgtcaacacacaaggcgttcttccaggcatggtctggcaggacagagacgtgtacctgcaggggcccatctgggcaaagattccacacacggacggacattttcacccctctccccccatgggcggattcggacttaaacaccctcctccacaaattctcatcaagaacaccccggtacctgcgaatccttcgaccactttcagtgcggcaaagtttgcttccttcatcacacagtactccacggggcaggtcagcgtggagatcgagtgggagctgcagaaggagaacagcaaacgctggaatcccgaaattcagtacacttccaactacaacaaatctgttaatgtggactttactgtggacactaatggtgtgtattcagagcctcgccccattggcgccagatacctgactcgtaatctgtaa

SEQ ID NO: 211 - protein, 735 aa, Adeno-associated virus
MAADGYLPDWLEDTLSEGIRQWWKLKPGPPPPKPAERHKDDSRGLVLPGYRYLGPFNGLDKGEPVNEADAAALEHDKAYDRQLDSGDNPYLKYNHVDAEFQERLKEDTSFGGNLGRAVFQAKKRILEPLGLVEEPVKAAPGEKRPVEHSPAEPDSSSGTGKAGQQPARKRLNFGQTGDADSVPDPQPLGQPPAAPSGLGTNTMASGSGAPMADNNEGADGVGNSSGNWHCDSTWMGDRVITTSTRTWALPTYNNHLYKQISSQSGASNDNHYFGYSTPWGHFDFNRFHCHFSPRDWQRLINNNWGFRPKRLSFKLFNIQVKEVTQNDGTTTIANNLTSTVQVFTDSEYQLPYVLGSAHQGCLPPFPADVFMVPQYGYLTLNNGSQAVGRSSFYCLEYFPSQMLRTGNNFTFSYTFEDVPFHSSYAHSQSLDRLMNPLIDQYLYYLSRTNTPSGTTTMSRLQFSQAGASDIRDQSRNWLPGPCYRQQRVSKTAADNNNSDYSWTGATKYHLNGRDSLVNPGPAMASHKDDEEKYFPQSGVLIFGKQDSGKTNVDIEKVMITDEEEIRTTNPVATEQYGSVSTNLQSGNTQAATSDVNTQGVLPGMVWQDRDVYLQGPIWAKIPHTDGHFHPSPPMGGFGLKHPPPQILIKNTPVPANPSTTFSAAKFASFITQYSTGQVSVEIEWELQKENSKRWNPEIQYTSNYNKSVNVDFTVDTNGVYSEPRPIGARYLTRNL

SEQ ID NO: 212 - DNA, 2208 bp, Adeno-associated virus
atggctgccgatggttatcttccagattggctcgaggacaccctctctgaaggaataagacagtggtggaagctcaaacctggcccaccaccaccaaagcccgcagagcggcataaggacgacagcaggggtcttgtgcttcctgggtacaagtacctcggacccttcaacggactcgacaagggagagccggtcaacgaggcagacgccgcggccctcgagcacgacaaggcctacgaccggcagctcgacagcggagataacccgtacctcaagtacaaccacgccgacgcggagtttcaggagcgccttaaagaggatacgtcttttgggggcaacctcggacgagcagtcttccaggccaaaaagaggattcttgaacctctgggcctggttgaggaacctgttaagacggctccgggaaaaaagaggccggtagagcactctcctgcggagccagactcctcctcgggaaccggaaaagcgggccagcagcctgcaagaaagagattgaattttggtcagactggagacgcagactcagtacctgacccccggcctctcggacagccaccagcagccccctctggtctgggaactaatacgatggcttcaggcagtggcgcaccaatggcagacaataacgagggcgccgacggagtgggtaattcctcgggaaattggcattgcgattccacatggatgggcgacagagtcatcaccaccagcacccgcacctgggccctgcccacctacaacaaccatctgtacaagcaaatctccagccagtctggagccagcaacgacaaccactactttggctacagcaccccctgggggtattttgacttcaacagattccactgccacttctccccacgtgactggcaaagactcatcaacaacaactggggattccggcccaagagactcagcttcaagctctttaacattcaagtcaaagaggtcacgcagaatgacggtacgacgacgattgccaataaccttaccagcacggttcaggtgtttactgactcggagtaccagctcccgtacgtcctcggctcggcgcatcaaggatgcctcccgccgttcccagcagacgtcttcatggtgccacagtatggatacctcaccctgaacaacggcagtcaggcggtaggacgctcttccttttactgcctggagtactttccttctcagatgcttcgtaccggaaacaactttaccttcagctacacctttgaagacgttcctttccatagcagctacgctcacagccaaagtctggaccgtctcatgaatcctctcatcgaccagtacctgtattacttgagcagaacaaacactccaagcggaaccaccacgatgtccaggcttcagttttctcaggccggagcaagtgacattcgggaccagtctagaaactggcttcctggaccctgttaccgccagcagcgagtatcaaagacagctgcggacaacaacaacagtgattactcgtggactggagctaccaagtaccacctcaatggaagagactctctggtgaatccgggcccagctatggccagccacaaggacgatgaagaaaaatattttcctcagagcggggttctcatctttggaaaacaagactcgggaaaaactaatgtggacattgaaaaggttatgattacagacgaagaggaaatcaggaccaccaatcccgtggctacggagcagtatggttctgtatctaccaacctccagagcggcaacacacaagcagctacctcagatgtcaacacacaaggcgttcttccaggcatggtctggcaggacagagacgtgtacctgcaggggcccatctgggcaaagattccacacacggacggacattttcacccctctcccctcatgggcggattcggacttaaacaccctcctccacaaattctcatcaagaacaccccggtacctgcgaatccttcgaccactttcagtgcggcaaagtttgcttccttcatcacacagtactccacggggcaggtcagcgtggagatcgagtgggagctgcagaaggagaacagcaaacgctggaatcccgaaattcagtacacttccaactacaacaaatctgttaatgtggactttactgtggacactaatggtgtgtattcagagcctcgccccattggcaccagatacctgactcgtaatctgtaa

SEQ ID NO: 213 - protein, 735 aa, Adeno-associated virus
MAADGYLPDWLEDTLSEGIRQWWKLKPGPPPPKPAERHKDDSRGLVLPGYKYLGPFNGLDKGEPVNEADAAALEHDKAYDRQLDSGDNPYLKYNHADAEFQERLKEDTSFGGNLGRAVFQAKKRILEPLGLVEEPVKTAPGKKRPVEHSPAEPDSSSGTGKAGQQPARKRLNFGQTGDADSVPDPRPLGQPPAAPSGLGTNTMASGSGAPMADNNEGADGVGNSSGNWHCDSTWMGDRVITTSTRTWALPTYNNHLYKQISSQSGASNDNHYFGYSTPWGYFDFNRFHCHFSPRDWQRLINNNWGFRPKRLSFKLFNIQVKEVTQNDGTTTIANNLTSTVQVFTDSEYQLPYVLGSAHQGCLPPFPADVFMVPQYGYLTLNNGSQAVGRSSFYCLEYFPSQMLRTGNNFTFSYTFEDVPFHSSYAHSQSLDRLMNPLIDQYLYYLSRTNTPSGTTTMSRLQFSQAGASDIRDQSRNWLPGPCYRQQRVSKTAADNNNSDYSWTGATKYHLNGRDSLVNPGPAMASHKDDEEKYFPQSGVLIFGKQDSGKTNVDIEKVMITDEEEIRTTNPVATEQYGSVSTNLQSGNTQAATSDVNTQGVLPGMVWQDRDVYLQGPIWAKIPHTDGHFHPSPLMGGFGLKHPPPQILIKNTPVPANPSTTFSAAKFASFITQYSTGQVSVEIEWELQKENSKRWNPEIQYTSNYNKSVNVDFTVDTNGVYSEPRPIGTRYLTRNL

SEQ ID NO: 214 - DNA, 2208 bp, Adeno-associated virus
atggctgccgatggttatcttccagattggctcgaggacactctctctgaaggaataagacagtggtggaagctcaaacctggcccaccaccaccaaagcccgcagagcggcataaggacgacagcaggggtcttgtgcttcctgggtacaagtacctcggacccttcaacggactcgacaagggagagccggtcaacgaggcagacgccgcggccctcgagcacgacaaggcctacgaccggcagctcgacagcggagacaacccgtacctcaagtacaaccacgccgacgcggagtttcaggagcgccttaaaggagatacgtcttttgggggcaacctcggacgagcagtcttccaggccaaaaagaggattcttgaacctctgggcctggttgaggaacctgttaagacggctccgggaaaaaagaggccggtagagcactctcctgcggagccagactcctcctcgggaaccggaaaagcgggccagcagcctgcaagaaagagattgaattttggtcagactggagacgcagactcagtacctgacccccagcctctcggacagccaccagcagccccctctggtctgggaactaatacgatggcttcaggcagtggcgcaccaatggcagacaataacgagggcgccgacggagtgggtaattcctcgggaaattggcattgcgattccacatggatgggcggcagagtcatcaccaccagcacccgcacctgggccctgcccacctacaacaaccatctgtacaagcaaatctccagccagtctggagccagcaacgacaaccactactttggctacagcaccccctgggggtattttgacttcaacagattccactgccacttctccccacgtgactggcaaagactcatcaacaacaactggggattccggcccaagagactcagcttcaagctctttaacattcaagtcaaagaggtcacgcagaatgacggtacgacgacgattgccaataaccttaccagcacggttcaggtgtttactgactcggagtaccagctcccgtacgtcctcggctcggcgcatcaaggatgcctcccgccgttcccagcagacgtcttcatggtgccacagtatggatacctcaccctgaacaacggcagtcaggcggtaggacgctcttccttttactgcctggagtactttccttctcagacgcttcgtaccggaaacaactttaccttcagctacacctttgaagacgttcctttccatagcagctacgctcacagccaaagtctggaccgtctcatgaatcctctcatcgaccagtacctgtattacttgagcagaacaaacactccaagcggaaccaccacgatgtccaggcttcagttttctcaggccggagcaagtgacattcgggaccagtctagaaactggcttcctggaccctgttaccgccagcagcgagtatcaaagacagctgcggacaacaacaacagtgattactcgtggactggagctaccaagtaccacctcaatggaagagactctctggtgaatccgggcccagctatggccagccacaaggacgatgaagaaaaatattttcctcagagcggggttctcatctttggaaaacaagactcgggaaaaactaatgtggacattgaaaaggttatgattacagacgaagaggaaatcaggaccaccaatcccgtggctacggagcagtatggttctgtatctaccaacctccagagcggcaacacacaagcagctacctcagatgtcaacacacaaggcgttcttccaggcatggtctggcaggacagagacgtgtacctgcaggggcccatctgggcaaagattccacacacggacggacattttcacccctctcccctcatgggcggattcggacttaaacaccctcctccacaaattctcatcaagaacaccccggtacctgcgaatccttcgaccactttcagtgcggcaaagtttgcttccttcatcacacagtactccacggggcaggtcagcgtggagatcgagtgggagctgcagaaggagaacagcaaacgctggaatcccgaaattcagtacacttccaactacaacaaatctgttaatgtggactttactgtggacactaatggtgtgtattcagagcctcgccccattggcaccagatacctgactcgtaatctgtaa

SEQ ID NO: 215 - protein, 735 aa, Adeno-associated virus
MAADGYLPDWLEDTLSEGIRQWWKLKPGPPPPKPAERHKDDSRGLVLPGYKYLGPFNGLDKGEPVNEADAAALEHDKAYDRQLDSGDNPYLKYNHADAEFQERLKGDTSFGGNLGRAVFQAKKRILEPLGLVEEPVKTAPGKKRPVEHSPAEPDSSSGTGKAGQQPARKRLNFGQTGDADSVPDPQPLGQPPAAPSGLGTNTMASGSGAPMADNNEGADGVGNSSGNWHCDSTWMGGRVITTSTRTWALPTYNNHLYKQISSQSGASNDNHYFGYSTPWGYFDFNRFHCHFSPRDWQRLINNNWGFRPKRLSFKLFNIQVKEVTQNDGTTTIANNLTSTVQVFTDSEYQLPYVLGSAHQGCLPPFPADVFMVPQYGYLTLNNGSQAVGRSSFYCLEYFPSQTLRTGNNFTFSYTFEDVPFHSSYAHSQSLDRLMNPLIDQYLYYLSRTNTPSGTTTMSRLQFSQAGASDIRDQSRNWLPGPCYRQQRVSKTAADNNNSDYSWTGATKYHLNGRDSLVNPGPAMASHKDDEEKYFPQSGVLIFGKQDSGKTNVDIEKVMITDEEEIRTTNPVATEQYGSVSTNLQSGNTQAATSDVNTQGVLPGMVWQDRDVYLQGPIWAKIPHTDGHFHPSPLMGGFGLKHPPPQILIKNTPVPANPSTTFSAAKFASFITQYSTGQVSVEIEWELQKENSKRWNPEIQYTSNYNKSVNVDFTVDTNGVYSEPRPIGTRYLTRNL

SEQ ID NO: 216 - DNA, 2208 bp, Adeno-associated virus
atggctgccgatggttatcttccagattggctcgaggacactctctctgaaggaataagacagtggtggaagctcaaacctggcccaccaccaccaaagcccgcagagcggcataaggacgacagcaggggtcttgtgcttcctgggtacaagtacctcggacccttcaacggactcgacaagggagagccggtcaacgaggcagacgccgcggccctcgagcacgacaaggcctacgaccggcagctcgacagcggagacaacccgtacctcaagtacaaccacgccgacgcggagtttcaggagcgtcttaaagaagatacgtcttttgggggcaacctcggacgagcagtcttccaggccaaaaagaggattcttgaacctctgggcctggttgaggaacctgttaagacggctccgggaaaaaagaggccggtagagcactctcctgcggagccagactcctcctcgggaaccggaaaagcgggccagcagcctgcaagaaagagattgaattttggtcagactggagacgcagactcagtacctgacccccagcctctcggacagccaccagcagccccctctggtctgggaactaatacgatggcttcaggcagtggcgcaccaatggcagacaataacgagggcgccgacggagtgggtaattcctcgggaaattggcattgcgattccacatggatgggcgacagagtcatcaccaccagcacccgcacctgggccctgcccacctgcaacaaccatctgtacaagcaaatctccagccagtctggagccagcaacgacaaccactactttggctacagcaccccctgggggtattttgacttcaacagattccactgccacttctccccacgtgactggcaaagactcatcaacaacaactggggattccggcccaagagactcagcttcaagctctttaacattcaagtcaaagaggtcacgcagaatgacggtacgacgacgattgccaataaccttaccagcacggttcaggtgtttactgactcggagtaccagctcccgtacgtcctcggctcggcgcatcaaggatgcctcccgccgttcccagcagacgtcttcatggtgccacagtatggatacctcaccctgaacaacggcagtcaggcggtaggacgctcttccttttactgcctggagtattttccttctcagatgcttcgtaccggaaacaactttaccttcagctacacctttgaagacgttcctttccatagcagctacgctcacagccaaagtctggaccgtctcatgaatcctctcatcgaccagtacctgtattacttgagcagaacaaacactccaagcggaaccaccacgatgtccaggcttcagttttctcaggccggagcaagtgacattcgggaccagtctagaaactggcttcctggaccctgttaccgccagcagcgagtatcaaagacagctgcggacaacaacaacagtgattactcgtggactggagctaccaagtaccacctcaatggaagagactctctggtgaatccgggcccagctatggccagccacaaggacgatgaagaaaaatattttcctcagagcggggttctcatctttggaaaacaagactcgggaaaaactaatgtggacattgaaaaggttatgattacagacgaagaggaaatcaggaccaccaatcccgtggctacggagcagtatggttctgtatctacctacctccagagcggcaacacacaagcagctacctcagatgtcaacacacaaggcgttcttccaggcatggtctggcaggacagagacgtgtacctgcgggggcccatctgggcaaagattccacacacggacggacattttcacccctctcccctcatgggcggatttggacttaaacaccctcctccacaaattctcatcaagaacaccccggtacctgcgaatccttcgaccactttcagtgcggcaaagtttgcttccttcatcacacagtactccacggggcaggtcagcgtggagatcgagtgggagctgcagaaggagaacagcaaacgctggaatcccgaaattcagtacacttccaactacaacaaatctgttaatgtggactttactgtggacactaatggtgtgtattcagagcctcgccccattggcaccagatacctgactcgtaatctgtaa

SEQ ID NO: 217 - protein, 735 aa, Adeno-associated virus
MAADGYLPDWLEDTLSEGIRQWWKLKPGPPPPKPAERHKDDSRGLVLPGYKYLGPFNGLDKGEPVNEADAAALEHDKAYDRQLDSGDNPYLKYNHADAEFQERLKEDTSFGGNLGRAVFQAKKRILEPLGLVEEPVKTAPGKKRPVEHSPAEPDSSSGTGKAGQQPARKRLNFGQTGDADSVPDPQPLGQPPAAPSGLGTNTMASGSGAPMADNNEGADGVGNSSGNWHCDSTWMGDRVITTSTRTWALPTCNNHLYKQISSQSGASNDNHYFGYSTPWGYFDFNRFHCHFSPRDWQRLINNNWGFRPKRLSFKLFNIQVKEVTQNDGTTTIANNLTSTVQVFTDSEYQLPYVLGSAHQGCLPPFPADVFMVPQYGYLTLNNGSQAVGRSSFYCLEYFPSQMLRTGNNFTFSYTFEDVPFHSSYAHSQSLDRLMNPLIDQYLYYLSRTNTPSGTTTMSRLQFSQAGASDIRDQSRNWLPGPCYRQQRVSKTAADNNNSDYSWTGATKYHLNGRDSLVNPGPAMASHKDDEEKYFPQSGVLIFGKQDSGKTNVDIEKVMITDEEEIRTTNPVATEQYGSVSTYLQSGNTQAATSDVNTQGVLPGMVWQDRDVYLRGPIWAKIPHTDGHFHPSPLMGGFGLKHPPPQILIKNTPVPANPSTTFSAAKFASFITQYSTGQVSVEIEWELQKENSKRWNPEIQYTSNYNKSVNVDFTVDTNGVYSEPRPIGTRYLTRNL

SEQ ID NO: 218 - DNA, 2208 bp, Adeno-associated virus; identical to SEQ ID NO: 212

SEQ ID NO: 219 - protein, 735 aa, Adeno-associated virus; identical to SEQ ID NO: 213

SEQ ID NO: 220 - DNA, 2208 bp, Adeno-associated virus
atggctgccgatggttatcttccagattggctcgaggacactctctctgaaggaataagacagtggtggaagctcaaacctggcccaccaccaccaaagcccgcagagcggcataaggacggcagcaggggtcttgtgcttcctgggtacaagtacctcggacccttcaacggactcgacaagggagagccggtcaacgaggcagacgccgcggccctcgagcacgacaaggcctacgaccggcagctcaacagcggagacaacccgtacctcaagtacaaccacgccgacgcggagtttcaggagcgccttaaagaagatacgtcttttgggggcaacctcggacgagcagtcttccaggcaaaaaagagggttcttgaacctctgggcctggttgaggagcctgttaaaacggctccgggaaaaaagagaccggtagagcactctcctgcggagccagactcctcctcgggaaccggaaaagcgggccagcagcctgcaagaaagagattgaattttggtcagactggagacgcagactccgtacctgacccccagcctctcggacagccaccagcagccccctctggtctgggatctactacaatggctacaggcagtggcgcaccaatggcagacaataacgagggtgccgatggagtgggtaattcctcaggaaattggcattgcgattcccaatggctgggcgacagagtcatcaccacaagcactcgaacctgggccctgcccacctacaacaaccacctctacaagcaaatctccagccaatcaggagcctcaaacgacaaccactattttggctacagcaccccttgggggtattttgacttcaacagattccactgccacttttcaccacgtgactggcaaagactcatcaacaacaactggggattccgacccaagagactcaacttcaagctctttaacattcaagtcaaagaggtcacgcagaatgacggtacgacgacgattgccaataaccttaccagcacggttcaggtgtttactgactcggagtaccagctcccgtacgtcctcggctcggcgcatcaaggatgcctcccgccgttcccagcggacgtcttcatggtcccacagtatggatacctcaccctgaacaacgggagtcaggcggtaggacgctctcccttttactgcctggagtactttccttctcagatgctgcgtactggaaacaactttcagttcagctacacttttgaagacgtgcctttccacagcagctacgctcacagccagagtctggatcggctgatgaatcctctgatcgaccagtacctgtattatctgaacaagacacaaacaaatagtggaactcttcagcagtctcggctactgtttagccaagctggacccaccaacatgtctcttcaagctaaaaactggctgcctggaccttgctacagacagcagcgtctgtcaaagcaggcaaacgacaacaacaacagcaactttccctggactgcagctacaaagtatcatctaaatggccgggactcgttggttaatccaggaccagctatggccagtcacaaggatgacgaagaaaagtttttccccatgcatggaaccctgatatttggtaaacaaggaacaaatgccaacgacgcggatttggaaaatgtcatgattacagatgaagaagaaatcaggaccaccaatcccgtggctacggagcagtacgggactgtgtcaaataatttgcaaaactcaaacactggtccaactactggaactgtcaatcaccaaggagcgttacctggtatggtgtggcaggatcgagatgtgtaccttcagggacccatttgggccaagattcctcacaccgatggacactttcatccttctccactgatgggaggttttggactcaaacacccgcctcctcagattatgatcaaaaacactcccgttccagccaatcctcctacaaacttcagttctgccaagtttgcttctttcatcacacagtattccacggggcaggtcagcgtggagatcgagtgggagctgcagaaggagaacagcaaacgctggaatcccgaaattcagtacacttccaactacaacaaatctgttaatgtggactttactgtggacaataatggcgtgtactcagagcctcgccccattggcaccagatacctgactcgtaatctgtaa

SEQ ID NO: 221 - protein, 735 aa, Adeno-associated virus
MAADGYLPDWLEDTLSEGIRQWWKLKPGPPPPKPAERHKDGSRGLVLPGYKYLGPFNGLDKGEPVNEADAAALEHDKAYDRQLNSGDNPYLKYNHADAEFQERLKEDTSFGGNLGRAVFQAKKRVLEPLGLVEEPVKTAPGKKRPVEHSPAEPDSSSGTGKAGQQPARKRLNFGQTGDADSVPDPQPLGQPPAAPSGLGSTTMATGSGAPMADNNEGADGVGNSSGNWHCDSQWLGDRVITTSTRTWALPTYNNHLYKQISSQSGASNDNHYFGYSTPWGYFDFNRFHCHFSPRDWQRLINNNWGFRPKRLNFKLFNIQVKEVTQNDGTTTIANNLTSTVQVFTDSEYQLPYVLGSAHQGCLPPFPADVFMVPQYGYLTLNNGSQAVGRSPFYCLEYFPSQMLRTGNNFQFSYTFEDVPFHSSYAHSQSLDRLMNPLIDQYLYYLNKTQTNSGTLQQSRLLFSQAGPTNMSLQAKNWLPGPCYRQQRLSKQANDNNNSNFPWTAATKYHLNGRDSLVNPGPAMASHKDDEEKFFPMHGTLIFGKQGTNANDADLENVMITDEEEIRTTNPVATEQYGTVSNNLQNSNTGPTTGTVNHQGALPGMVWQDRDVYLQGPIWAKIPHTDGHFHPSPLMGGFGLKHPPPQIMIKNTPVPANPPTNFSSAKFASFITQYSTGQVSVEIEWELQKENSKRWNPEIQYTSNYNKSVNVDFTVDNNGVYSEPRPIGTRYLTRNL

SEQ ID NO: 222 - DNA, 2208 bp, Adeno-associated virus
atggctgccgatggttatcttccagattggctcgaggacactctctctgaaggaataagacagtggtggaagctcaaacctggcccaccaccaccaaagcccgcagagcggcataaggacgacagcaggggtcttgtgcttcctgggtacaagtacctcggacccttcaacggactcgacaagggagagccggtcaacgaggcagacgccgcggccctcgagcacgacaaggcctacgaccggcagctcgacagcggagacaacccgtacctcaagtacaaccacgccgacgcggagtttcaggagcgtcttaaagaagatacgtcttttgggggcaacctcggacgagcagtcttccaggccaaaaagaggattcttgaacctctgggcctggttgaggaacctgttaagacggctccgggaaaaaagaggccggtagagcactctcctgcggagccagactcctcctcgggaaccggaaaagcgggccagcagcctgcaagaaagagattgaattttggtcagactggagacgcagactcagtacctgacccccagcctctcggacagccaccagcagccccctctggtctgggaactaatacgatggcttcaggcagtggcgcaccaatggcagacaataacgagggcgccgacggagtgggtaattcctcgggaaattggcattgcgattccacatggatgggcgacagagtcatcaccaccagcacccgcacctgggccctgcccacctacaacaaccatctgtacaagcaaatctccagccagtctggagccagcaacgacaaccactactttggctacagcaccccctgggggtattttgacttcaacagattccactgccacttctccccacgtgactggcaaagactcatcaacaacaactggggattccggcccaagagactcagcttcaagctctttaacattcaagtcaaagaggtcacgcagaatgacggtacgacgacgattgccaataaccttaccagcacggttcaggtgtttactgactcggagtaccagctcccgtacgtcctcggctcggcgcatcaaggatgcctcccgccgttcccagcagacgtcttcatggtgccacagtatggatacctcaccctgaacaacggcagtcaggcggtaggacgctcttccttttactgcctggagtactttccttctcagatgcttcgtaccggaaacaactttaccttcagctacacctttgaagacgttcctttccatagcagctacgctcacagccaaagtctggaccgtctcatgaatcctctcatcgaccagtacctgtattacttgagcagaacaaacactccaagcggaaccaccacgatgtccaggcttcagttttctcaggccggagcaagtgacattcgggaccagtctagaaactggcttcctggaccctgttaccgccagcagcgagtatcaaagacagctgcggacaacaacaacagtgattactcgtggactggagctaccaagtaccacctcaatggaagagactctctggtgaatccgggcccagctatggccagccacaaggacgatgaagaaaaatattttcctcagagcggggttctcatctttggaaaacaagactcgggaaaaactaatgtggacattgaaaaggttatgattacagacgaagaggaaatcaggaccaccaatcccgtggctacggagcagtatggttctgtatctaccaacctccagagcggcaacacacaagcagctacctcagatgtcaacacacaaggcgttcttccaggcatggtctggcaggacagagacgtgtacctgcaggggcccatctgggcaaagattccacacacggacggacattttcacccctctcccctcatgggcggattcggacttaaacaccctcctccacaaattctcatcaagaacaccccggtacctgcgaatccttcgaccactttcagtgcggcaaagtttgcttccttcatcacacagtactccacggggcaggtcagcgtggagatcgagtgggagctgcagaaggagaacagcaaacgctggaatcccgaaattcagtacacttccaactacaacaaatctgttaatgtggactttactgtggacactaatggtgtgtattcagagcctcgccccattggcaccagatacctgactcgtaatctgtaa

SEQ ID NO: 223 - protein, 735 aa, Adeno-associated virus
MAADGYLPDWLEDTLSEGIRQWWKLKPGPPPPKPAERHKDDSRGLVLPGYKYLGPFNGLDKGEPVNEADAAALEHDKAYDRQLDSGDNPYLKYNHADAEFQERLKEDTSFGGNLGRAVFQAKKRILEPLGLVEEPVKTAPGKKRPVEHSPAEPDSSSGTGKAGQQPARKRLNFGQTGDADSVPDPQPLGQPPAAPSGLGTNTMASGSGAPMADNNEGADGVGNSSGNWHCDSTWMGDRVITTSTRTWALPTYNNHLYKQISSQSGASNDNHYFGYSTPWGYFDFNRFHCHFSPRDWQRLINNNWGFRPKRLSFKLFNIQVKEVTQNDGTTTIANNLTSTVQVFTDSEYQLPYVLGSAHQGCLPPFPADVFMVPQYGYLTLNNGSQAVGRSSFYCLEYFPSQMLRTGNNFTFSYTFEDVPFHSSYAHSQSLDRLMNPLIDQYLYYLSRTNTPSGTTTMSRLQFSQAGASDIRDQSRNWLPGPCYRQQRVSKTAADNNNSDYSWTGATKYHLNGRDSLVNPGPAMASHKDDEEKYFPQSGVLIFGKQDSGKTNVDIEKVMITDEEEIRTTNPVATEQYGSVSTNLQSGNTQAATSDVNTQGVLPGMVWQDRDVYLQGPIWAKIPHTDGHFHPSPLMGGFGLKHPPPQILIKNTPVPANPSTTFSAAKFASFITQYSTGQVSVEIEWELQKENSKRWNPEIQYTSNYNKSVNVDFTVDTNGVYSEPRPIGTRYLTRNL

SEQ ID NO: 224 - DNA, 2208 bp, Adeno-associated virus
atggctgccgatggttatcttccagattggctcgaggacactctctctgaaggaataagacagtggtggaagctcaaacctggcccaccaccaccaaagcccgcagagcggcataaggacgacagcaggggtcttgtgcttcctgggtacaagtacctcggacccttcaacggactcgacaagggagagccggtcaacgaggcagacgccgcggccctcgagcacgacaaggcctacgaccggcagctcgacagcggagacaacccgtacctcaagtacaaccacgccgacgcggagtttcaggagcgtcttaaagaagatacgtcttttgggggcaacctcggacgagcagtcttccaggccaaaaagaggattcttgaacctctgggcctggttgaggaacctgttaagacggctccgggaaaaaagaggccggtagagcactctcctgcggagccagactcctcctcgggaaccggaaaagcgggccagcagcctgcaagaaagagattgaattttggtcagactggagacgcagactcagtacctgacccccagcctctcggacagccaccagcagccccctctggtctgggaactaatacgatggcttcaggcagtggcgcaccaatggcagacaataacgagggcgccgacggagtgggtaattcctcgggaaattggcattgcgattccacatggatgggcgacagagtcatcaccaccagcacccgcacctgggccctgcccacctacaacaaccatctgtacaagcaaatctccagccagtctggagccagcaacgacaaccactactttggctacagcaccccctgggggtatttcgacttcaacagattccactgccacttctccccacgtgactggcaaagactcatcaacaacaactggggattccggcccaagagactcagcttcaagctctttaacattcaagtcaaagaggtcacgcagaatgacggtacgacgacgattgccaataaccttaccagcacggttcaggtgtttactgactcggggtaccagctcccgtacgtcctcggctcggcgcatcaaggatgccttccgccgttcccagcagacgtcttcatggtgccacagtatggatacctcaccctgaacaacggcagtcaggcggtaggacgctcttccttttactgcctggagtactttccttctcagatgcttcgtaccggaaacaactttaccttcagctacacctttgaagacgttcctttccatagcagctacgctcacggccaaagtctggaccgtctcatgaatcctctcatcgaccagtacctgtattacttgagcagaacaaacactccaagcggaaccaccacgatgtccaggcttcagttttctcaggccggagcaagtgacgttcgggaccagtctagaaactggcttcctggaccctgttaccgccagcagcgagtatcaaagacagctgcggacaacaacaacagtgattactcgtggactggagctaccaagtaccacctcaatggaagagactctctggtgaatccgggcccagctatggccagccacaaggacgatgaagaaaaatattttcctcagagcggggttctcgtctttggaaaacaagactcgggaaaaactaatgtggacattgaaaaggttatgattacagacgaagaggaaatcaggaccaccaatcccgcggctacggagcagtatggttctgtatctaccaacctccagagcggcaacacacaagcagctacctcagatgtcaacacacaaggcgttcttccaggcatggtctggcaggacagagacgtgtacctgcaggggcccatctgggcaaagattccacacacggacggacattttcacccctctcccctcatgggcggattcggacttaaacaccctcctccacaaattctcatcaagaacaccccggtacctgcgaatccttcgaccactttcagtgcggcaaagtttgtttccttcatcacacagtactccacggggcaggtcagcgtggagatcgagtgggagctgcagaaggagaacagcaaacgctggaatcccgaaattcagtacacttccaactacaacaaatctgttaatgtggactttactgtggacactaatggtgtgtattcagagcctcgccccattggcaccagatacctgactcgtaatctgtaa

SEQ ID NO: 225 - protein, 735 aa, Adeno-associated virus
MAADGYLPDWLEDTLSEGIRQWWKLKPGPPPPKPAERHKDDSRGLVLPGYKYLGPFNGLDKGEPVNEADAAALEHDKAYDRQLDSGDNPYLKYNHADAEFQERLKEDTSFGGNLGRAVFQAKKRILEPLGLVEEPVKTAPGKKRPVEHSPAEPDSSSGTGKAGQQPARKRLNFGQTGDADSVPDPQPLGQPPAAPSGLGTNTMASGSGAPMADNNEGADGVGNSSGNWHCDSTWMGDRVITTSTRTWALPTYNNHLYKQISSQSGASNDNHYFGYSTPWGYFDFNRFHCHFSPRDWQRLINNNWGFRPKRLSFKLFNIQVKEVTQNDGTTTIANNLTSTVQVFTDSGYQLPYVLGSAHQGCLPPFPADVFMVPQYGYLTLNNGSQAVGRSSFYCLEYFPSQMLRTGNNFTFSYTFEDVPFHSSYAHGQSLDRLMNPLIDQYLYYLSRTNTPSGTTTMSRLQFSQAGASDVRDQSRNWLPGPCYRQQRVSKTAADNNNSDYSWTGATKYHLNGRDSLVNPGPAMASHKDDEEKYFPQSGVLVFGKQDSGKTNVDIEKVMITDEEEIRTTNPAATEQYGSVSTNLQSGNTQAATSDVNTQGVLPGMVWQDRDVYLQGPIWAKIPHTDGHFHPSPLMGGFGLKHPPPQILIKNTPVPANPSTTFSAAKFVSFITQYSTGQVSVEIEWELQKENSKRWNPEIQYTSNYNKSVNVDFTVDTNGVYSEPRPIGTRYLTRNL

SEQ ID NO: 226 - DNA, 2208 bp, Adeno-associated virus
atggctgccgatggttatcttccagattggctcgaggacactctctctgaaggaataagacagtggtggaaactcaaacctggcccaccaccaccaaagcccgcagagcggcataaggacgacagcaggggtcttgtgcttcctgggtacaagtacctcggacccttcaacggactcgacaagggagagccggtcaacgaggcagacgccgcggccctcgagcacgacaaggcctacgaccggcagctcgacagcggagacaacccgtacctcaagtacaaccacgccgacgcggagtttcaggagcgccttaaagaagatacgtcttttgggggcaacctcggacgagcagtcttccaggcaaaaaagagggttctggaacctctgagcctggttgaggagcctgttaagacggctccgggaaaaaagaggccggtagagcactctcccgcagagccagattcctcctccggaactggaaagtcgggcaaccagcctgcaagaaagagattgaatttcggtcagactggagactcagactccgtacctgacccccagcctctcggacagccaccagcagccccctctggtctgggaactaatacgatggctacaggcagtggcgcaccaatggcagacaataacgagggcgccgacggagtgggtaattcctcgggaaattggcattgcgattccacatggatgggcgacagagtcatcaccaccagcacccgaacctgggccctgcccacctacaacaaccatctgtacaagcaaatatccagccagtctggagccagcaacgacaatcactactttggctacagcaccccctgggggtattttgacttcaacagattccactgccacttttcaccacgtgactggcaaagactcatcaacaacaactggggattccgacccaagagactcaacttcaagctctttaacattcaagtcaaagaggtcacgcagaatgacggtacgacgacgattgccaataaccttaccagcacggttcaggtgtttactgactcggagtaccagctcccgtacgtcctcggctcggcgcatcaaggatgcctcccgccgttcccagcagacgtcttcatggtgccacagtatggatacctcaccctgaacaacgggagtcaggcagtaggacgctcttcattttactgcctagagtactttccttctcagatgctgcgtaccggaaacaactttaccttcagctacacctttgaggacgttcctttccacagcagctacgctcacagccagagtttggaccgtctcatgaatcctctcatcgaccagtacctgtattacttgagcagaacaaacactccaagcggaaccaccacgcagtccaggcttcagttttctcaggccggagcgagtgacattcaggaccagtctaggaactggcttcctggaccctgttaccgtcagcagcgagtatcaaagacatctgcggataacaacaacagtgaatactcgtggactggagctaccaagtaccacctcaatggcagagactctctggtgaatccgggcccggccatggccagccacaaagacgatgaagaaaagttttttcctcagagcggggttcttatctttgggaagcaaggctcagagaaaacaaatgtggatattgaaaaggtcatgattacagacgaagaggaaatcaggaccaccaatcccgtggctacggagcagtatggttctgtatctaccaacctccagagcggcaacacacaagcagctaccgcagatgtcaacacacaaggcgttcttccaggcatggtcgggcaagacagagacgtgtacctgcaggggcctacttgggcaaagattccacacacggacggacattttcacccctctcccctcatgggcggatttggacttaaacaccctcctccacagattctcatcaagaacaccccggtacctgcgaatccttcgaccaccttcagtgcggcaaagtttgcttccttcattacacagtactccacggggcaggtcagcgtggagatcgagtgggagctgcagaaggagaacagcaaacgctggaatcccgagatccagtacacttccaactacaacaagtctgttaatgtggactttactgtggacactaatggcgtgtattcagagcctcgccccattggcaccagatacctgactcgtaatctgtaa

SEQ ID NO: 227 - protein, 735 aa, Adeno-associated virus
MAADGYLPDWLEDTLSEGIRQWWKLKPGPPPPKPAERHKDDSRGLVLPGYKYLGPFNGLDKGEPVNEADAAALEHDKAYDRQLDSGDNPYLKYNHADAEFQERLKEDTSFGGNLGRAVFQAKKRVLEPLSLVEEPVKTAPGKKRPVEHSPAEPDSSSGTGKSGNQPARKRLNFGQTGDSDSVPDPQPLGQPPAAPSGLGTNTMATGSGAPMADNNEGADGVGNSSGNWHCDSTWMGDRVITTSTRTWALPTYNNHLYKQISSQSGASNDNHYFGYSTPWGYFDFNRFHCHFSPRDWQRLINNNWGFRPKRLNFKLFNIQVKEVTQNDGTTTIANNLTSTVQVFTDSEYQLPYVLGSAHQGCLPPFPADVFMVPQYGYLTLNNGSQAVGRSSFYCLEYFPSQMLRTGNNFTFSYTFEDVPFHSSYAHSQSLDRLMNPLIDQYLYYLSRTNTPSGTTTQSRLQFSQAGASDIQDQSRNWLPGPCYRQQRVSKTSADNNNSEYSWTGATKYHLNGRDSLVNPGPAMASHKDDEEKFFPQSGVLIFGKQGSEKTNVDIEKVMITDEEEIRTTNPVATEQYGSVSTNLQSGNTQAATADVNTQGVLPGMVGQDRDVYLQGPTWAKIPHTDGHFHPSPLMGGFGLKHPPPQILIKNTPVPANPSTTFSAAKFASFITQYSTGQVSVEIEWELQKENSKRWNPEIQYTSNYNKSVNVDFTVDTNGVYSEPRPIGTRYLTRNL

SEQ ID NO: 228 - DNA, 2208 bp, Adeno-associated virus
atggctgccgatggttatcttccagattggctcgaggacactctctctgaaggaataagacagtggtggaagctcaaacctggcccaccaccaccaaagcccgcagagcggcataaggacgacagcaggggtcttgtgcttcctgggtacaagtacctcggacccttcaacggactcgacaagggagagccggtcaacgaggcagacgccgcggccctcgagcacgacaaggcctacgaccggcagctcgacagcggagacaacccgtacctcaagtacaaccacgccgacgcagagtttcaggagcgccttaaagaagatacgtcttttgggggcaacctcggacgagcagtcttccaggcaaaaaagagggttctggaacctctgggcctggttgaggagcctgttaagacggctccgggaaaaaagaggccggtagagcactctcctgcagagccagattcctcctccggaactggaaagtcgggcaaccagcctgcaagaaagagattgaatttcggtcagactggagactcagactccgtacctgacccccagcctctcggacagccaccagcagccccctctggtctgggaactaatacgatggctacaggcagtggcgcaccaatggcagacaataacgagggcgccgacggagtgggtaattcctcgggaaattggcattgcgattccacatggatgggcgacagagtcatcaccaccagcacccgaacctgggccctgcccacctacaacaaccatctgtacaagcaaatatccagccagtctggagccagcaacgacaatcactactttggctacagcaccccctgggggtattttgacttcaacagattccactgccacttttcaccacgtgactggcaaagactcatcaacaacaactggggattccgacccaagagactcaacttcaagctctttaacattcaagtcaaagaggtcacgcagaatgacggtacgacgacgattgccaataaccttaccagcacggttcaggtgtttactgactcggagtaccagctcccgtacgtcctcggctcggcgcatcaaggatgcctcccgccgttcccagcagacgtcttcatggtgccacagtatggatacctcaccctgaacaacgggagtcaggcagtaggacgctcttcattttactgcctagggtactttccttctcagatgctgcgtaccggaaacaactttaccttcagctacacctttgaggacgttcctttccacagcagctacgctcacagccagagtttggaccgtctcatgaatcctctcatcgaccagtacctgtattacttgagcagaacaaacactccaagcggaaccaccacgcagtccaggcttcagttttctcaggccggagcgagtgacattcgggaccagtctaggaactggcttcctggaccctgttaccgtcagcagcgagtatcaaagacatctgcggataacaacaacagtgaatactcgtggactggagctaccaagtaccacctcaatggcagagactctctggtgaatccgggcccggccatggccagccacaaagacgatgaagaaaagttttttcctcagagcggggttcttatctttgggaagcaaggcccagagaaaacaaatgtggatattgaaaaggtcatgattacagacgaagaggaaatcaggaccaccaatcccgtggctacggagcagtatggttctgtatctaccaacctccagagcggcaacacacaagcagctaccgcagatgtcaacacacaaggcgttcttccaggcatggtctggcaagacagagacgtgtacctgcaggggcctatttgggcaaagattccacacacggacggacattttcacccctctcccctcatgggcggatttggacttaaacaccctcctccacagattctcatcaagaacaccccggtacctgcgaatccttcgaccaccttcagtgcggcaaagtttgcttccttcattacacagtactccacggggcaggtcagcgtggagatcgagtgggagctgcagaaggagaacagcaaacgctggaatcccgagatccagtacacttccaactacaacaagtctgttaatgtggactttactgtggacactaatggcgtgtattcagagcctcgccccattggcaccagatacctgactcgtaatctgtaa

SEQ ID NO: 229 - protein, 735 aa, Adeno-associated virus
MAADGYLPDWLEDTLSEGIRQWWKLKPGPPPPKPAERHKDDSRGLVLPGYKYLGPFNGLDKGEPVNEADAAALEHDKAYDRQLDSGDNPYLKYNHADAEFQERLKEDTSFGGNLGRAVFQAKKRVLEPLGLVEEPVKTAPGKKRPVEHSPAEPDSSSGTGKSGNQPARKRLNFGQTGDSDSVPDPQPLGQPPAAPSGLGTNTMATGSGAPMADNNEGADGVGNSSGNWHCDSTWMGDRVITTSTRTWALPTYNNHLYKQISSQSGASNDNHYFGYSTPWGYFDFNRFHCHFSPRDWQRLINNNWGFRPKRLNFKLFNIQVKEVTQNDGTTTIANNLTSTVQVFTDSEYQLPYVLGSAHQGCLPPFPADVFMVPQYGYLTLNNGSQAVGRSSFYCLGYFPSQMLRTGNNFTFSYTFEDVPFHSSYAHSQSLDRLMNPLIDQYLYYLSRTNTPSGTTTQSRLQFSQAGASDIRDQSRNWLPGPCYRQQRVSKTSADNNNSEYSWTGATKYHLNGRDSLVNPGPAMASHKDDEEKFFPQSGVLIFGKQGPEKTNVDIEKVMITDEEEIRTTNPVATEQYGSVSTNLQSGNTQAATADVNTQGVLPGMVWQDRDVYLQGPIWAKIPHTDGHFHPSPLMGGFGLKHPPPQILIKNTPVPANPSTTFSAAKFASFITQYSTGQVSVEIEWELQKENSKRWNPEIQYTSNYNKSVNVDFTVDTNGVYSEPRPIGTRYLTRNL

SEQ ID NO: 230 - protein, 735 aa, Adeno-associated virus
MAADGYLPDWLEDTLSEGIRQWWKLKPGPPPPKPAERHKDDSRGLVLPGYKYLGPFNGLDKGEPVNEADAAALEHDKAYDRQLDSGDNPYLKYNHADAEFQERLKEDTSFGGNLGRAVFQAKKRVLEPLGLVEEPVKTAPGKKRPVEHSPAEPDSSSGTGKSGNQPARKRLNFGQTGDSDSVPDPQPLGQPPAAPSGLGTNTMATGSGAPMADNNEGADGVGNSSGNWHCDSTWMGDRVITTSTRTWALPTYNNHLYKQISSQSGASNDNHYFGYSTPWGYFDFNRFHCHFSPRDWQRLINNNWGFRPKRLNFKLFNIQVKEVTQNDGTTTIANNLTSTVQVFTDSEYQLPYVLGSAHQGCLPPFPADVFMVPQYGYLTLNNGSQAVGRSSFYCLEYFPSQMLRTGNNFTFSYTFEDVPFHSSYAHSQSLDRLMNPLIDQYLYYLSRTNTPSGTTTQSRLQFSQAGASDIRDQSRNWLPGPCYRQQRVSKTSADNNNSEYSWTGATKYHLNGRDSLVNPGPAMASHKDDEEKFFPQSGVLIFGKQGPEKTNVDIEKVMITDEEEIRTTNPVATEQYGSVSTNLQSGNTQAATADVNTQGVLPGMVWQDRDVYLQGPIWAKIPHTDGHFHPSPLMGGFGLKHPPPQILIKNTPVPANPSTTFSAAKFASFITQYSTGQVSVEIEWELQKENSKRWNPEIQYTSNYNKSVNVDFTVDTNGVYSEPRPIGTRYLTRNL

SEQ ID NO: 231 - protein, 735 aa, Adeno-associated virus; identical to SEQ ID NO: 230

SEQ ID NO: 232 - DNA, 2211 bp, Adeno-associated virus
atggctgccgatggttatcttccagattggctcgaggacactctctctgaaggaataagacagtggtggaagctcaaacctggcccaccaccaccaaagcccgcagagcggcataaggacgacagcaggggtcttgtgcttcctgggtacaagtacctcggacccttcaacggactcgacaagggggagccggtcaacgaggcagacgccgcggccctcgagcacgacaaggcctacgaccggcagctcgacagcggagacaacccgtacctcaagtacaaccacgccgacgcagagtttcaggagcgccttaaagaagatacgtcttttgggggcaacctcggacgagcagtcttccaggcgaaaaagagggttcttgaacctctgcggcctggtttgaggaaacctgttaagacggctccgggaaaaaagaggccggtagagcactctcctgtggagccagactcctcctcgggaaccggaaaagcgggccagcagcctgcaagaaaaagattaaattttggtcagactggagacgcagactccgtacctgacccccagcctctcggacagccaccagcagccccctctggtctgggatctactacaatggctacaggcagtggcgcaccaatggcagacaataacgagggtgccgatggagtgggtaattcctcaggaaattggcattgcgattcccaatggctggacgacagagtcatcgccaccagcacccgaacctgggccctgcccacatacaacaaccacctctacaagcaaatctccagccaatcaggagcctgcaacgacaaccactactttggctacagcaccccctgggggtattttgacttcaacagattccactgccacttttcaccacgtgactggcaaagactcatcaacagcaactggggattccggcccaaaagactcaacttcaagctctttaatattcaagtcaaagaggtcacgcagaatgacggtacgacgacgattgccaataaccttaccagcacggttcaggtgtttactgactcggagtaccagctcccgtacgtcccgggctcggcgcatcaaggatgcctcccgccgtttccagcggacgtcttcatggtcccacagtatggatacctcaccctgaacaacgggagtcaggcggtaggacgctcttccttttactgcctggagtactttccttctcagatgctgcgtactggaaacaactttcagttcagctacacttttgaagacgtgcctttccacagcagctacgctcactgccagagtctggatcggctgatgaatcctctgatcgaccagtacctgtattatctgaacaagacacaaacaaatagtggaactcttcagcagtctcggctactgtttagccaagctggaccaaccaacatgtctcttcaagctaaaaactggctgcctggaccttgctacagacagcagcgtctgtcaaaacaggcaaacgacaataacaactgcaactttccctggactgcagctacaaagtatcatctaaatggccgggactcgttggttaatccaggaccagctatggccagtcacaaggatgacgaagaaaagtttttccccatgcatggaaccctgatatttggtaaacaaggaacaaatgccaacgacgcggatttggaaaatgtcatgattacagatgaagaagaaatcaggcccaccaatcccgtggctacggagcagtacgggactgtgtcaaataatttgcaaaactcaaacactggtccaactacaggaactgtcaatcaccaaggagcgttacctggtatggtgtggcaggatcgagacgtgtacctgcagggacccatttgggccaagattcctcacaccgatggacactttcatccttctccactgatgggaggttttggactcaaacacccgcctcctcagatcatgatcaaaagcactcccgttccagccaatcctcccacaaacttcagttctgccaagtttgcttcttccatcacacagtattccacgggacaggtcagcgtggagatcgagtgggagctgcagaaggagaacagcaaacgctggaatcccgaaattcagtacacttccaactacaacaagtctgttaatgtggactttactgtggacactaatggtgtgtattcagagcctcgccccattggcaccagatacctgactcgtaatctgtaa

SEQ ID NO: 233 - protein, 736 aa, Adeno-associated virus
MAADGYLPDWLEDTLSEGIRQWWKLKPGPPPPKPAERHKDDSRGLVLPGYKYLGPFNGLDKGEPVNEADAAALEHDKAYDRQLDSGDNPYLKYNHADAEFQERLKEDTSFGGNLGRAVFQAKKRVLEPLRPGLRKPVKTAPGKKRPVEHSPVEPDSSSGTGKAGQQPARKRLNFGQTGDADSVPDPQPLGQPPAAPSGLGSTTMATGSGAPMADNNEGADGVGNSSGNWHCDSQWLDDRVIATSTRTWALPTYNNHLYKQISSQSGACNDNHYFGYSTPWGYFDFNRFHCHFSPRDWQRLINSNWGFRPKRLNFKLFNIQVKEVTQNDGTTTIANNLTSTVQVFTDSEYQLPYVPGSAHQGCLPPFPADVFMVPQYGYLTLNNGSQAVGRSSFYCLEYFPSQMLRTGNNFQFSYTFEDVPFHSSYAHCQSLDRLMNPLIDQYLYYLNKTQTNSGTLQQSRLLFSQAGPTNMSLQAKNWLPGPCYRQQRLSKQANDNNNCNFPWTAATKYHLNGRDSLVNPGPAMASHKDDEEKFFPMHGTLIFGKQGTNANDADLENVMITDEEEIRPTNPVATEQYGTVSNNLQNSNTGPTTGTVNHQGALPGMVWQDRDVYLQGPIWAKIPHTDGHFHPSPLMGGFGLKHPPPQIMIKSTPVPANPPTNFSSAKFASSITQYSTGQVSVEIEWELQKENSKRWNPEIQYTSNYNKSVNVDFTVDTNGVYSEPRPIGTRYLTRNL

SEQ ID NO: 234 - DNA, 2208 bp, Adeno-associated virus
atggctgccgatggttatcttccagattggctcgaggacactctctctgaaggaataagacagtggtggaagctcaaacctggcccaccaccaccaaagcccgcagagcggcataaggacgacagcaggggtcttgtgcttcctgggtacaagtacctcggacccttcaacggactcgacaagggagagccggtcaacgaggcagacgccgcggccctcgagcacgacaaggcctacgaccggcagctcgacagcggagacaacccgtacctcaagtacaaccacgccgacgcggagtttcaggagcgccttaaagaggatacgtcttttgggggcaacctcggacgagcagtcttccaggcaaaaaagagggttctggaacctctgggcctggttgaggagcctgttaagacggctccgggaaaaaagaggccggtagagcactctcctgcagagccagattcctcctccggaactggaaagtcgggcaaccagcctgcaagaaagagattgaatttcggtcagactggagactcagactccgtacctgacccccagcctctcggacagccaccagcagccccctctggtctgggaactaatacgatggctacaggcagtggcgcaccaatggcagacaataacgagggcgccgacggagtgggtaattcctcgggaaattggcattgcgattccacatggatgggcgacagagtcatcaccaccagcacccgaacctgggccctgcccacctacaacaaccatctgtacaagcaaatatccagccagtctggagccagcaacgacaatcactactttggctacagcaccccctgggggtattttgacttcaacagattccactgccacttttcaccacgtgactggcaaagactcatcaacaacaactggggattccgacccaagagactcaacttcaagctctttaacattcaagtcaaagaggtcacgcagaatgacggtacgacgacgattgccaataaccttaccagcacggttcaggtgtttactgactcggagtaccagctcccgtacgtcctcggctcggcgcatcaaggatgcctcccgccgttcccagcagacgtcttcatggtgccacagtatggatacctcaccctgaacaacgggagtcaggcagtaggacgctcttcattttactgcctagagtactttccttctcagatgctgcgtaccggaaacagctttaccttcagctacacctttgaggacgttcctttccacagcagctacgctcacagccagagtttggaccgtctcatgaatcctctcatcgaccagtacctgtattacttgagcagaacaaacactccaagcggaaccaccacgcagtccaggcttcagttttctcaggccggagcgagtgacattcgggaccagtctaggaactggcttcctggaccctgttaccgtcagcagcgagtatcaaagacatctgcggataacaacaacagtgaatactcgtggactggagctaccaagtaccacctcaatggcagagactctctggtgaatccgggcccggccatggccagccacaaagacgatgaagaaaagttctttcctcagagcggggttcttatctttgggaagcaaggctcagagaaaacaaatgtggatattgaaaaggtcatgattacagacgaagaggaaatcaggaccaccaatcccgtggctacggagcagtatggttctgtatctaccaacctccagagcggcaacacacaagcagctaccgcagatgtcaacacacaaggcgttcttccaggcatggtctggcaagacagagacgtgtacctgcaggggcctatttgggcaaagattccacacacggacggacattttcacccctctcccctcatgggcggatttggacttaaacaccctcctccacagattctcatcaagaacaccccggtacctgcgaatccttcgaccaccttcagtgcggcaaagtttgcttccttcattacacagtactccacggggcaggtcagcgtggagatcgagtgggagctgcagaaggagaacagcaaacgctggaatcccgagatccagtacacttccaactacaacaagtctgttaatgtggactttactgtggacactaatggcgtgtattcagagcctcgccccattggcaccagatacctgactcgtaatctgtaa

SEQ ID NO: 235 - protein, 735 aa, Adeno-associated virus
MAADGYLPDWLEDTLSEGIRQWWKLKPGPPPPKPAERHKDDSRGLVLPGYKYLGPFNGLDKGEPVNEADAAALEHDKAYDRQLDSGDNPYLKYNHADAEFQERLKEDTSFGGNLGRAVFQAKKRVLEPLGLVEEPVKTAPGKKRPVEHSPAEPDSSSGTGKSGNQPARKRLNFGQTGDSDSVPDPQPLGQPPAAPSGLGTNTMATGSGAPMADNNEGADGVGNSSGNWHCDSTWMGDRVITTSTRTWALPTYNNHLYKQISSQSGASNDNHYFGYSTPWGYFDFNRFHCHFSPRDWQRLINNNWGFRPKRLNFKLFNIQVKEVTQNDGTTTIANNLTSTVQVFTDSEYQLPYVLGSAHQGCLPPFPADVFMVPQYGYLTLNNGSQAVGRSSFYCLEYFPSQMLRTGNSFTFSYTFEDVPFHSSYAHSQSLDRLMNPLIDQYLYYLSRTNTPSGTTTQSRLQFSQAGASDIRDQSRNWLPGPCYRQQRVSKTSADNNNSEYSWTGATKYHLNGRDSLVNPGPAMASHKDDEEKFFPQSGVLIFGKQGSEKTNVDIEKVMITDEEEIRTTNPVATEQYGSVSTNLQSGNTQAATADVNTQGVLPGMVWQDRDVYLQGPIWAKIPHTDGHFHPSPLMGGFGLKHPPPQILIKNTPVPANPSTTFSAAKFASFITQYSTGQVSVEIEWELQKENSKRWNPEIQYTSNYNKSVNVDFTVDTNGVYSEPRPIGTRYLTRNL

SEQ ID NO: 236 - DNA, 2211 bp, Adeno-associated virus; identical to SEQ ID NO: 126

SEQ ID NO: 237 - protein, 736 aa, Adeno-associated virus
MAADGYLPDWLEDTLSEGIRQWWKLKPGPPPPKPAERHKDDSRGLVLPGYKYLGPGNGLDKGEPVNAADAAALEHDKAYDQQLKAGDNPYLKYNHADAEFQERLKEDTSFGGNLGRAVFQAKKRLLEPLGLVEEAAKTAPGKKRPVEQSPQEPDSSAGIGKSGSQPAKKKLNFGQTGDTESVPDPQPIGEPPAAPSGVGSLTMASGGGAPVADNNEGADGVGSSSGNWHCDSQWLGDRVITTSTRTWALPTYNNHLYKQISNSTSGGSSNDNAYFGYSTPWGYFDFNRFHCHFSPRDWQRLINNNWGFRPKRLNFKLFNIQVKEVTDNNGVKTIANNLTSTVQVFTDSDYQLPYVLGSAHEGCLPPFPADVFMIPQYGYLTLNDGGQAVGRSSFYCLEYFPSQMLRTGNNFQFSYEFENVPFHSSYAHSQSLDRLMNPLIDQYLYYLSKTINGSGQNQQTLKFSVAGPSNMAVQGRNYIPGPSYRQQRVSTTVTQNNNSEFAWPGASSWALNGRNSLMNPGPAMASHKEGEDRFFPLSGSLIFGKQGTGRDNVDADKVMITNEEEIKTTNPVATESYGQVATNHQSAQAQAQTGWVQNQGILPGMVWQDRDVYLQGPIWAKIPHTDGNFHPSPLMGGFGMKHPPPQILIKNTPVPADPPTAFNKDKLNSFITQYSTGQVSVEIEWELQKENSKRWNPEIQYTSNYYKSNNVEFAVSTEGVYSEPRPIGTRYLTRNL

SEQ ID NO: 238 - DNA, 2211 bp, Adeno-associated virus
atggctgccgatggttatcttccagattggctcgaggacactctctctgaaggaataagacagtggtggaagctcaaacctggcccaccaccaccaaagcccgcagagcggcataaggacgacagcaggggtcttgtgcttcctgggtacaagtacctcggacccggcaacggactcgacaagggggagccggtcaacgcagcagacgcggcggccctcgagcacgacaaggcctacgaccagcagctcaaggccggagacaacccgtacctcaagtacaaccacgccgacgccgagttccaggagcggctcaaagaagatacgtcttttgggggcaacctcgggcgagcagtcttccaggccaaaaagaggcttcttgaacctcttggtctggttgaggaagcggctaagacggctcctggaaagaagaggcctgtagagcagtctcctcaggaaccggactcctccgcgggtattggcaaatcgggttcacagcccgctaaaaagaaactcaatttcggtcagactggcgacacagagtcagtccccgaccctcaaccaatcggagaacctcccgcagccccctcaggtgtgggatctcttacaatggcttcaggtggtggcgcaccagtggcagacaataacgaaggtgccgatggagtgggtagttcctcgggaaattggcattgcgattcccaatggctgggggacagagtcatcaccaccagcacccgaacctgggccctgcccacctacaacaatcacctctacaagcaaatctccaacagcacatctggaggatcttcaaatgacaacgcctacttcggctacagcaccccctgggggtattttgacttcaacagattccactgccacttctcaccacgtgactggcagcgactcatcaacaacaactggggattccggcctaagcgactcaacttcaagctcttcaacattcaggtcaaagaggttacggacaacaatggagtcaagaccatcgccaataaccttaccagcacggtccaggtcttcacggactcagactatcagctcccgtacgtgctcgggtcggctcacgagggctgcctcccgccgttcccagcggacgttttcatgattcctcagtacgggtatctgacgcttaatgatgggagccaggccgtgggtcgttcgtccttttactgcctggaatatttcccgtcgcaaatgctaagaacgggtaacaacttccagttcagctacgagtttgagaacgtacctttccatagcagctacgctcacagccaaagcctggaccgactaatgaatccactcatcgaccaatacttgtactatctctcaaagactattaacggttctggacagaatcaacaaacgctaaaattcagcgtggccggacccagcaacatggctgtccagggaagaaactacatacctggacccagctaccgacaacaacgtgtctcaaccactgtgactcaaaacaacaacagcgaatttgcttggcctggagcttcttcttgggctctcaatggacgtaatagcttgatgaatcctggacctgctatggccagccacaaagaaggagaggaccgtttctttcctttgtctggatctttaatttttggcaaacaaggaactggaagagacaacgtggatgcggacaaagtcatgataaccaacgaagaagaaattaaaactactaacccggtagcaacggagtcctatggacaagtggccacaaaccaccagagtgcccaagcacaggcgcagaccggctgggttcaaaaccaaggaatacttccgggtatggtttggcaggacagagatgtgtacctgcaaggacccatttgggccaaaattcctcacacggacggcaactttcacccttctccgctaatgggagggtttggaatgaagcacccgcctcctcagatcctcatcaaaaacacacctgtacctgcggatcctccaacggctttcaataaggacaagctgaactctttcatcacccagtattctactggccaagtcagcgtggagattgagtgggagctgcagaaggaaaacagcaagcgctggaacccggagatccagtacacttccaactattacaagtctaataatgttgaatttgctgttaatactgaaggtgtatatagtgaaccccgccccattggcaccagatacctgactcgtaatctgtaa

SEQ ID NO: 239 - protein, 736 aa, Adeno-associated virus
MAADGYLPDWLEDTLSEGIRQWWKLKPGPPPPKPAERHKDDSRGLVLPGYKYLGPGNGLDKGEPVNAADAAALEHDKAYDQQLKAGDNPYLKYNHADAEFQERLKEDTSFGGNLGRAVFQAKKRLLEPLGLVEEAAKTAPGKKRPVEQSPQEPDSSAGIGKSGSQPAKKKLNFGQTGDTESVPDPQPIGEPPAAPSGVGSLTMASGGGAPVADNNEGADGVGSSSGNWHCDSQWLGDRVITTSTRTWALPTYNNHLYKQISNSTSGGSSNDNAYFGYSTPWGYFDFNRFHCHFSPRDWQRLINNNWGFRPKRLNFKLFNIQVKEVTDNNGVKTIANNLTSTVQVFTDSDYQLPYVLGSAHEGCLPPFPADVFMIPQYGYLTLNDGSQAVGRSSFYCLEYFPSQMLRTGNNFQFSYEFENVPFHSSYAHSQSLDRLMNPLIDQYLYYLSKTINGSGQNQQTLKFSVAGPSNMAVQGRNYIPGPSYRQQRVSTTVTQNNNSEFAWPGASSWALNGRNSLMNPGPAMASHKEGEDRFFPLSGSLIFGKQGTGRDNVDADKVMITNEEEIKTTNPVATESYGQVATNHQSAQAQAQTGWVQNQGILPGMVWQDRDVYLQGPIWAKIPHTDGNFHPSPLMGGFGMKHPPPQILIKNTPVPADPPTAFNKDKLNSFITQYSTGQVSVEIEWELQKENSKRWNPEIQYTSNYYKSNNVEFAVNTEGVYSEPRPIGTRYLTRNL

SEQ ID NO: 240 - DNA, 2208 bp, Adeno-associated virus
atggctgccgatggttatcttccagattggctcgaggacactctctctgaaggaataagacagcggtggaagctcaaacctggcccaccaccaccagagcccgcagagcggcataaggacgacagcaggggtcttgtgcttcctgggtacaagtacctcggacccttcaacggactcgacaagggagagccggtcaacgaggcagacgccgcggccctcgagcacgacaaagcctacgaccggcagctcgacagcggagacaacccgtacctcaagtacaaccacgccgacgcggagtttcaggagcgccttaaagaagatacgtcttttgggggcaacctcggacgagcagtcttccaggcgaaaaagagggtacttgaacctctgggcctggttgaggaacctgttaagacggctccgggaaaaaagaggccggtagagcactctcctgtggagccagactcctcctcgggaaccggaaaggcgggccagcagcctgcaagaaaaagattgaattttggtcagactggagacgcagactcagtacctgacccccagcctctcggacagccaccagcagccccctctggtctgggaactaatacgatggctacaggcagtggcgcaccaatggcagacaataacgagggcgccgacggagtgggtaattcctcgggaaattggcattgcgattccacatggatgggcgacagagtcatcaccaccagcacccgaacctgggccctgcccacctacaacaaccacctctacaaacaaatttccagccaatcaggagcctcgaacgacaatcactactttggctacagcaccccttgggggtattttgacttcaacagattccactgccacttttcaccacgtgactggcaaagactcatcaacaacaactggggattccgacccaagagactcaacttcaagctctttaacattcaagtcaaagaggtcacgcagaatgacggtacgacgacgattgccaataaccttaccggcacggttcaggtgtttactgactcggagtaccagctcccgtacgtcctcggctcggcgcatcaaggatgcctcccgccgttcccagcagacgtcttcatggtgccacagtatggatacctcaccctgaacaacgggagtcaggcagtaggacgctcttcattttactgcctggagtactttccttctcagatgctgcgtaccggaaacaactttaccttcagctacacttttgaggacgttcctttccacagcagctacgctcacagccagagtctgggccgtctcatgaatcctctcatcgaccagtacctgtattacttgagcagaacaaacactccaagtggaaccaccacgcagtcaaggcttcagttttctcaggccggagcgagtgacattcgggaccagtctaggaactggcttcctggaccctgttaccgccagcagcgagtatcaaagacatctgcggataacaacaacagtgaatactcgtggactggagctaccaagtaccacctcaatggcagagactctctggtgaatccgggcccggccatggcaagccacaaggacgatgaagaaaagttttttcctcagagcggggttctcatctttgggaagcaaggctcagagaaaacaaatgtggacattgaaaaggtcatgattacagacgaagaggaaatcaggacaaccaatcccgtggctacggagcagtatggttctgtatctaccaacctccagagaggcaacagacaagcagctaccgcagatgtcaacacacaaggcgttcttccaggcatggtctggcaggacagagatgtgtaccttcaggggcccatctgggcaaagattccacacacggacggacattttcacccctctcccctcatgggtggattcggacttaaacaccctcctccacagattctcatcaagaacaccccggtacctgcgaatccttcgaccaccttcagtgcggcaaagtttgcttccttcatcacacagtactccacgggacaggtcagcgtggagatcgagtgggagctgcagaaggaaaacagcaaacgctggaatcccgaaattcagtacacttccaactacaacaagtctgttaatgtggactttactgtggacactaatggcgtgtattcagagcctcgccccattggcaccagatacctgactcgtaatctgtaa

SEQ ID NO: 241 - protein, 735 aa, Adeno-associated virus
MAADGYLPDWLEDTLSEGIRQRWKLKPGPPPPEPAERHKDDSRGLVLPGYKYLGPFNGLDKGEPVNEADAAALEHDKAYDRQLDSGDNPYLKYNHADAEFQERLKEDTSFGGNLGRAVFQAKKRVLEPLGLVEEPVKTAPGKKRPVEHSPVEPDSSSGTGKAGQQPARKRLNFGQTGDADSVPDPQPLGQPPAAPSGLGTNTMATGSGAPMADNNEGADGVGNSSGNWHCDSTWMGDRVITTSTRTWALPTYNNHLYKQISSQSGASNDNHYFGYSTPWGYFDFNRFHCHFSPRDWQRLINNNWGFRPKRLNFKLFNIQVKEVTQNDGTTTIANNLTGTVQVFTDSEYQLPYVLGSAHQGCLPPFPADVFMVPQYGYLTLNNGSQAVGRSSFYCLEYFPSQMLRTGNNFTFSYTFEDVPFHSSYAHSQSLGRLMNPLIDQYLYYLSRTNTPSGTTTQSRLQFSQAGASDIRDQSRNWLPGPCYRQQRVSKTSADNNNSEYSWTGATKYHLNGRDSLVNPGPAMASHKDDEEKFFPQSGVLIFGKQGSEKTNVDIEKVMITDEEEIRTTNPVATEQYGSVSTNLQRGNRQAATADVNTQGVLPGMVWQDRDVYLQGPIWAKIPHTDGHFHPSPLMGGFGLKHPPPQILIKNTPVPANPSTTFSAAKFASFITQYSTGQVSVEIEWELQKENSKRWNPEIQYTSNYNKSVNVDFTVDTNGVYSEPRPIGTRYLTRNL

SEQ ID NO: 242 - DNA, 2208 bp, Adeno-associated virus
atggctgccgatggttatcttccagattggctcgaggacactctctctgaaggaataagacagcggtggaagctcaaacctggcccaccaccaccagagcccgcagagcggcataaggacgacagcaggggtcttgtgcttcctgggtacaagtacctcggacccttcaacggactcgacaagggagagccggtcaacgaggcagacgccgcggccctcgagcacgacaaagcctacgaccggcagctcgacagcggagacaacccgtacctcaagtacaaccacgccgacgcggagtttcaggagcgccttaaagaagatacgtcctttgggggcaacctcggacgagcagtcttccaggcgaaaaagagggtacttgaacctctgggcctggttgaggaacctgttaagacggctccgggaaaaaagaggccggtagagcactctcctgtggagccagactcctcctcgggaaccggaaaggcgggccagcagcctgcaagaaaaagattgaattttggtcagactggagacgcagactcagtacctgacccccagcctctcggacagccaccagcagccccctctggtctgggaactaatacgatggctacaggcagtggcgcaccaatggcagacaataacgagggcgccgacggagtgggtaattcctcgggaaattggcattgcgattccacatggatgggcgacagagtcatcaccaccagcacccgaacctgggccctgcccacctacaacaaccacctctacaaacaaatttccagccaatcaggagcctcgaacgacaatcactactttggctacagcaccccttgggggtattttgacttcaacagattccactgccacttttcaccacgtgactggcaaagactcatcaacaacaactggggattccgacccaagagactcaacttcaagctctttaacattcaagtcaaagaggtcacgcagaatgacggtacgacgacgattgccaataaccttaccagcacggttcaggtgtttactgactcggagtaccagctcccgtacgtcctcggctcggcgcatcaaggatgcctcccgccgttcccagcagacgtcttcatggtgccacagtatggatacctcaccctgaacaacgagagtcaggcagtaggacgctcttcattttactgcctggagtactttccttctcagatgctgcgtaccggaaacaactttaccttcagctacacttttgaggacgttcctttccacagcagctacgctcacagccagagtctgggccgtctcatgaatcctctcatcgaccagtacctgtattacttgagcagaacaaacactccaagtggaaccaccacgcagtcaaggcttcagttttctcaggccggagcgagtgacattcgggaccagtctaggaactggcttcctggaccctgttaccgccagcagcgagtatcaaagacatctgcggataacaacaacagtgaatactcgtggactggagctaccaagtaccacctcaatggcagagactctctggtgaatccgggcccggccatggcaagccacaaggacgatgaagaaaagttttttcctcagagcggggttctcatctttgggaagcaaggctcagagaaaacaaatgtggacattgaaaaggtcatgattacagacgaagaggaaatcaggacaaccaatcccgtggctacggagcagtatggttctgtatctaccaacctccagagaggcaacagacaagcagctaccgcagatgtcaacacacaaggcgttcttccaggcatggtctggcaggacagagatgtgtaccttcaggggcccatctgggcaaagattccacacacggacggacattttcacccctctcccctcatgggtggattcggacttaaacaccctcctccacagattctcatcaagaacaccccggtacctgcgaatccttcgaccaccttcagtgcggcaaagtttgcttccttcatcacacagtactccacgggacaggtcagcgtggagatcgagtgggagctgcagaaggaaaacagcaaacgctggaatcccgaaattcagtacacttccaactacaacaagtctgttaatgtggactttactgtggacactaatggcgtgtattcagagcctcgccccattggcaccagatacctgactcgtaatctgtaa

SEQ ID NO: 243 - protein, 735 aa, Adeno-associated virus
MAADGYLPDWLEDTLSEGIRQRWKLKPGPPPPEPAERHKDDSRGLVLPGYKYLGPFNGLDKGEPVNEADAAALEHDKAYDRQLDSGDNPYLKYNHADAEFQERLKEDTSFGGNLGRAVFQAKKRVLEPLGLVEEPVKTAPGKKRPVEHSPVEPDSSSGTGKAGQQPARKRLNFGQTGDADSVPDPQPLGQPPAAPSGLGTNTMATGSGAPMADNNEGADGVGNSSGNWHCDSTWMGDRVITTSTRTWALPTYNNHLYKQISSQSGASNDNHYFGYSTPWGYFDFNRFHCHFSPRDWQRLINNNWGFRPKRLNFKLFNIQVKEVTQNDGTTTIANNLTSTVQVFTDSEYQLPYVLGSAHQGCLPPFPADVFMVPQYGYLTLNNESQAVGRSSFYCLEYFPSQMLRTGNNFTFSYTFEDVPFHSSYAHSQSLGRLMNPLIDQYLYYLSRTNTPSGTTTQSRLQFSQAGASDIRDQSRNWLPGPCYRQQRVSKTSADNNNSEYSWTGATKYHLNGRDSLVNPGPAMASHKDDEEKFFPQSGVLIFGKQGSEKTNVDIEKVMITDEEEIRTTNPVATEQYGSVSTNLQRGNRQAATADVNTQGVLPGMVWQDRDVYLQGPIWAKIPHTDGHFHPSPLMGGFGLKHPPPQILIKNTPVPANPSTTFSAAKFASFITQYSTGQVSVEIEWELQKENSKRWNPEIQYTSNYNKSVNVDFTVDTNGVYSEPRPIGTRYLTRNL

SEQ ID NO: 244 - DNA, 2208 bp, Adeno-associated virus
atggctgccgatggttatcttccagattggctcgaggacactctctctgaaggaataagacagcggtggaagctcaaacctggcccaccaccaccagagcccgcagagcggcataaggacgacagcaggggtcttgtgcttcctgggtacaagtacctcggacccttcaacggactcgacaagggagagccggtcaacgaggcagacgccgcggccctcgagcacgacaaagcctacgaccggcagctcgacagcggagacaacccgtacctcaagtacaaccacgccgacgcggagtttcaggagcgccttaaagaagatacgtcttttgggggcaacctcggacgagcagtcttccaggcgaaaaagagggtacttgaacctctgggcctggttgaggaacctgttaagacggctccgggaaaaaagaggccggtagagcactctcctgtggagccagactcctcctcgggaaccggaaaggcgggccagcagcctgcaagaaaaagattgaattttggtcagactggagacgcagactcagtacctgacccccagcctctcggacagccaccagcagccccctctggtctgggaactaatacgatggctacaggcagtggcgcaccaatggcagacaataacgagggcgccgacggagtgggtaattcctcgggaaattggcattgcgattccacatggatgggcgacagagtcatcaccaccagcacccgaacctgggccctgcccacctacaacaaccacctctacaaacaaatttccagccaatcaggagcctcgaacgacaatcactactttggctacagcaccccttgggggtattttgacttcaacagattccactgccacttttcaccacgtgactggcaaagactcatcaacaacaactggggattccgacccaagagactcaacttcaagctctttaacattcaagtcaaagaggtcacgcagaatgacggtacgacgacgattgccaataaccttaccagcacggttcaggtgtttactgactcggagtaccagctcccgtacgtcctcggctcggcgcatcaaggatgcctcccgccgttcccagcagacgtcttcatggtaccacagtatggatacctcaccctgaacaacgggagtcaggcagtaggacgctcttcattttactgcctggagtactttccttctcagatgctgcgtaccggaaacaactttaccttcagctacacttttgaggacgttcctttccacagcagctacgctcacagccagagtctgggccgtctcatgaatcctctcatcgaccagtacctgtattacttgagcagaacaaacactccaagtggaaccaccacgcagtcaaggcttcagttttctcaggccggagcgagtgacattcgggaccagtctaggaactggcttcctggaccctgttaccgccagcagcgagtatcaaagacatctgcggataacaacaacagtgaatactcgtggactggagctaccaagtaccacctcaatggcagagactctctggtgaatccgggcccggccatggcaagccacaaggacgatgaagaaaagttttttcctcagagcggggttctcatctttgggaagcaaggctcagagaaaacaaatgtggacattgaaaaggtcatgattacagacgaagaggaaatcaggacaaccaatcccgtggctacggagcagtatggttctgtatctaccaacctccagagaggcaacagacaagcagctaccgcagatgtcaacacacaaggcgttcttccaggcatggtctggcaggacagagatgtgtaccttcaggggcccatctgggcaaagattccacacacggacggacattttcacccctctcccctcatgggtggattcggacttaaacaccctcctccacagattctcatcaagaacaccccggtacctgcgaatccttcgaccaccttcagtgcggcaaagtttgcttccttcatcacacagtactccacgggacaggtcagcgtggagatcgagtgggagctgcagaaggaaaacagcaaacgctggaatcccgaaattcagtacacttccaactacaacaagtctgttaatgtggactttactgtggacactaatggcgtgtattcagagcctcgccccattggcaccagatacctgactcgtaatctgtaa

SEQ ID NO: 245 - protein, 735 aa, Adeno-associated virus
MAADGYLPDWLEDTLSEGIRQRWKLKPGPPPPEPAERHKDDSRGLVLPGYKYLGPFNGLDKGEPVNEADAAALEHDKAYDRQLDSGDNPYLKYNHADAEFQERLKEDTSFGGNLGRAVFQAKKRVLEPLGLVEEPVKTAPGKKRPVEHSPVEPDSSSGTGKAGQQPARKRLNFGQTGDADSVPDPQPLGQPPAAPSGLGTNTMATGSGAPMADNNEGADGVGNSSGNWHCDSTWMGDRVITTSTRTWALPTYNNHLYKQISSQSGASNDNHYFGYSTPWGYFDFNRFHCHFSPRDWQRLINNNWGFRPKRLNFKLFNIQVKEVTQNDGTTTIANNLTSTVQVFTDSEYQLPYVLGSAHQGCLPPFPADVFMVPQYGYLTLNNGSQAVGRSSFYCLEYFPSQMLRTGNNFTFSYTFEDVPFHSSYAHSQSLGRLMNPLIDQYLYYLSRTNTPSGTTTQSRLQFSQAGASDIRDQSRNWLPGPCYRQQRVSKTSADNNNSEYSWTGATKYHLNGRDSLVNPGPAMASHKDDEEKFFPQSGVLIFGKQGSEKTNVDIEKVMITDEEEIRTTNPVATEQYGSVSTNLQRGNRQAATADVNTQGVLPGMVWQDRDVYLQGPIWAKIPHTDGHFHPSPLMGGFGLKHPPPQILIKNTPVPANPSTTFSAAKFASFITQYSTGQVSVEIEWELQKENSKRWNPEIQYTSNYNKSVNVDFTVDTNGVYSEPRPIGTRYLTRNL

SEQ ID NO: 246 - DNA, 2208 bp, Adeno-associated virus
atggctgccgatggttatcttccagattggctcgaggacactctctctgaaggaataagacagcggtggaagctcaaacctggcccaccaccaccagagcccgcagagcggcataaggacgacagcaggggtcttgtgcttcctgggtacaagtacctcggacccttcaacggactcgacaagggagagccggtcaacgaggcagacgccgcggccctcgagcacgacaaagcctacgaccggcagctcgacagcggagacaacccgtacctcaagtacaaccacgccgacgcggagtttcaggagcgccttaaagaagatacgtcttttgggggcaacctcggacgagcagtcttccaggcgaaaaagagggtactcgaacctctgggcctggttgaggaacctgttaagacggctccgggaaaaaagaggccggtagagcactctcctgtggagccagactcctcctcgggaaccggaaaggcgggccagcagcctgcaagaaaaagattgaattttggtcagactggagacgcagactcagtacctgacccccagcctctcggacagccaccagcagccccctctggtctgggaactaatacgatggctacaggcagtggcgcaccaatggcagacaataacgagggcgccgacggagtgggtaattcctcgggaaattggcattgcgattccacatggatgggcgacagagtcatcaccaccagcacccgaacctgggccctgcccacctacaacaaccacctctacaaacaaatttccagccaatcaggagcctcgaacgacaatcactactttggctacagcaccccttgggggtattttgacttcaacagattccactgccacttttcaccacgtgactggcaaagactcatcaacaacaactggggattccgacccaagagactcaacttcaagctctttaacattcaagtcaaagaggtcacgcagaatgacggtacgacgacgattgccaataaccttaccagcacggttcaggtgtttactgactcggagtaccagctcccgtacgtcctcggctcggcgcatcaaggatgcctcccgccgttcccagcagacgtcttcatggtgccacagtatggatacctcaccctgaacaacgggagtcaggcagcaggacgctcttcattttactgcctggagtactttccttctcagatgctgcgtaccggaaacaactttaccttcagctacacttttgaggacgttcctttccacagcagctacgctcacagccagagtctgggccgtctcatgaatcctctcatcgaccagtacctgtattacttgagcagaacaaacactccaagtggaaccaccacgcagtcaaggcttcagttttctcaggccggagcgagtgacattcgggaccagtctaggaactggcttcctggaccctgttaccgccagcagcgagtatcaaagacatctgcggataacaacaacagtgaatactcgtggactggagctaccaagtaccacctcaatggcagagactctctggtgaatccgggcccggccatggcaagccacaaggacgatgaagaaaagttttttcctcagagcggggttctcatctttgggaagcaaggctcagagaaaacaaatgtggacattgaaaaggtcatgattacagacgaagaggaaatcaggacaaccaatcccgtggctacggagcagtatggttctgtatctaccaacctccagagaggcaacagacaagcagctaccgcagatgtcaacacacaaggcgttcttccaggcatggtctggcaggacagagatgtgtaccttcaggggcccatctgggcaaagattccacacacggacggacattttcacccctctcccctcatgggtggattcggacttaaacaccctcctccacagattctcatcaagaacaccccggtacctgcgaatccttcgaccaccttcagtgcggcaaagtttgcttccttcatcacacagtactccacgggacaggtcagcgtggagatcgagtgggagctgcagaaggaaaacagcaaacgctggaatcccgaaattcagtacacttccaactacaacaagtccgttaatgtggactttactgtggacactaatggcgtgtattcagagcctcgccccattggcaccagatacctgactcgtaatctgtaa

SEQ ID NO: 247 - protein, 735 aa, Adeno-associated virus
MAADGYLPDWLEDTLSEGIRQRWKLKPGPPPPEPAERHKDDSRGLVLPGYKYLGPFNGLDKGEPVNEADAAALEHDKAYDRQLDSGDNPYLKYNHADAEFQERLKEDTSFGGNLGRAVFQAKKRVLEPLGLVEEPVKTAPGKKRPVEHSPVEPDSSSGTGKAGQQPARKRLNFGQTGDADSVPDPQPLGQPPAAPSGLGTNTMATGSGAPMADNNEGADGVGNSSGNWHCDSTWMGDRVITTSTRTWALPTYNNHLYKQISSQSGASNDNHYFGYSTPWGYFDFNRFHCHFSPRDWQRLINNNWGFRPKRLNFKLFNIQVKEVTQNDGTTTIANNLTSTVQVFTDSEYQLPYVLGSAHQGCLPPFPADVFMVPQYGYLTLNNGSQAAGRSSFYCLEYFPSQMLRTGNNFTFSYTFEDVPFHSSYAHSQSLGRLMNPLIDQYLYYLSRTNTPSGTTTQSRLQFSQAGASDIRDQSRNWLPGPCYRQQRVSKTSADNNNSEYSWTGATKYHLNGRDSLVNPGPAMASHKDDEEKFFPQSGVLIFGKQGSEKTNVDIEKVMITDEEEIRTTNPVATEQYGSVSTNLQRGNRQAATADVNTQGVLPGMVWQDRDVYLQGPIWAKIPHTDGHFHPSPLMGGFGLKHPPPQILIKNTPVPANPSTTFSAAKFASFITQYSTGQVSVEIEWELQKENSKRWNPEIQYTSNYNKSVNVDFTVDTNGVYSEPRPIGTRYLTRNL

SEQ ID NO: 248 - protein, 738 aa, Adeno-associated virus; identical to SEQ ID NO: 90

SEQ ID NO: 249 - DNA, 2217 bp, Adeno-associated virus
atggctgctgacggttatcttccagattggctcgaggacaacctctctgagggcattcgcgagtggtgggacctgaaacctggagcccccaagcccaaggccaaccagcagaagcaggacgacggccggggtctggtgcttcctggctacaagtacctcggacccttcaacggactcgacaagggggagcccgtcaacgcggcggacgcagcggccctcgagcacgacaaggcctacgaccagcagctcaaagcgggtgacaatccgtacctgcggtataaccacgccgacgccgagtttcaggagcgtctgcaagaagatacgtcttttgggggcaacctcgggcgagcagtcttccaggccaagaagcgggttctcgaacctctcggtctggttgaggaagctgctaagacggctcctggaaagaagagaccggtagaaccgtcacctcagcgttcccccgactcctccacgggcatcggcaagaaaggccagcagcccgctaaaaagagactgaactttggtcagactggcgactcagagtcagtccccgaccctcaaccaatcggagaaccaccagcaggcccctctggtctgggatctggtacaatggctgcaggcggtggcgctccaatggcagacaataacgaaggcgccgacggagtgggtagttcctcaggaaattggcattgcgattccacatggctgggcgacagagtcatcaccaccagcacccgaacctgggccctgcccacctacaacaaccacctctacaagcaaatatccaatgggacatcgggaggaagcaccaacgacaacacctacttcggctacagcaccccctgggggtattttgacttcaacagattccactgccacttctcaccacgtgactggcagcgactcatcaacaacaactggggattccggccaaaaagactcagcttcaagctcttcaacatccaggtcaaggaggtcacgcagaatgaaggcaccaagaccatcgccaataaccttaccagcacgattcaggtatttacggactcggaataccagctgccgtacgtcctcggctccgcgcaccagggctgcctgcctccgttcccggcggacgtcttcatgattccccagtacggctaccttacactgaacaatggaagtcaagccgtaggccgttcctccttctactgcctggaatattttccatctcaaatgctgcgaactggaaacaattttgaattcagctacaccttcgaggacgtgcctttccacagcagctacgcacacagccagagcttggaccgactgatgaatcctctcatcgaccagtacctgtactacttatccagaactcagtccacaggaggaactcaaggtacccagcaattgttattttctcaagctgggcctgcaaacatgtcggctcaggctaagaactggctacctggaccttgctaccggcagcagcgagtctctacgacactgtcgcaaaacaacaacagcaactttgcttggactggtgccaccaaatatcacctgaacggaagagactctttggtaaatcccggtgtcgccatggcaacccacaaggacgacgaggaacgcttcttcccgtcgagtggagtcctgatgttcggaaaacagggtgctggaagagacaatgtggactacagcagcgttatgctaaccagcgaagaagaaattaaaaccactaaccccgtagccacagaacaatacggtgtggtggctgacaacttgcagcaaaccaatacagggcctattgtgggaaatgtcaacagccaaggagccttacctggcatggtctggcagaaccgagacgtgtacctgcagggtcccatctgggccaagattcctcacacggacggcaacttccacccttcaccgctaatgggaggatttggactgaagcacccacctcctcagatcctgatcaagaacacgccggtacctgcggatcctccaacaacgttcagccaggcgaaattggcttccttcattacgcagtacagcaccggacaggtcagcgtggaaatcgagtgggagctgcagaaggagaacagcaaacgctggaacccagagattcagtacacttcaaactactacaaatctacaaatgtggactttgctgtcaatacagagggaacttattctgagcctcgccccattggtactcgttacctcacccgtaatctgtaa

SEQ ID NO: 250 - protein, 738 aa, Adeno-associated virus
MAADGYLPDWLEDNLSEGIREWWDLKPGAPKPKANQQKQDDGRGLVLPGYKYLGPFNGLDKGEPVNAADAAALEHDKAYDQQLKAGDNPYLRYNHADAEFQERLQEDTSFGGNLGRAVFQAKKRVLEPLGLVEEAAKTAPGKKRPVEPSPQRSPDSSTGIGKKGQQPAKKRLNFGQTGDSESVPDPQPIGEPPAGPSGLGSGTMAAGGGAPMADNNEGADGVGSSSGNWHCDSTWLGDRVITTSTRTWALPTYNNHLYKQISNGTSGGSTNDNTYFGYSTPWGYFDFNRFHCHFSPRDWQRLINNNWGFRPKRLSFKLFNIQVKEVTQNEGTKTIANNLTSTIQVFTDSEYQLPYVLGSAHQGCLPPFPADVFMIPQYGYLTLNNGSQAVGRSSFYCLEYFPSQMLRTGNNFEFSYTFEDVPFHSSYAHSQSLDRLMNPLIDQYLYYLSRTQSTGGTQGTQQLLFSQAGPANMSAQAKNWLPGPCYRQQRVSTTLSQNNNSNFAWTGATKYHLNGRDSLVNPGVAMATHKDDEERFFPSSGVLMFGKQGAGRDNVDYSSVMLTSEEEIKTTNPVATEQYGVVADNLQQTNTGPIVGNVNSQGALPGMVWQNRDVYLQGPIWAKIPHTDGNCHPSPLMGGFGLKHPPPQILIKNTPVPADPPTTFSQAKLASFITQYSTGQVSVEIEWELQKENSKRWNPEIQYTSNYYKSTNVDFAVNTEGTYSEPRPIGTRYLTRNL

SEQ ID NO: 251 - protein, 738 aa, Adeno-associated virus
MAADGYLPDWLEDNLSEGIREWWDLKPGAPKPKANQQKQDDGRGLVLPGYKYLGPFNGLDKGEPVNAADAAALEHDKAYDQQLKAGDNPYLRYNHADAEFQERLQEDTSFGGNLGRAVFQAKKRVLEPLGLVEEGAKTAPGKKRPVEPSPQRSPDSSTGIGKKGQQPARKRLNFGRTGDSESVPDPQPIGEPPAAPSSVGSGTMAAGGGAPMADNNEGADGVGSSSGNWHCDSTWLGDRVITTSTRTWALPTYNNHLYKQISNGTSGGSTNDNTYFGYSTPWGYLDFNRFHCHFSPRDWQRLINNNWGFRPKRLSFKLFNIQVKEVTQNEGTKTIANNLASTIQVFTDSEYQPPYVLGSAHQGCLPPFPADVFMIPQYGYLTLNNGSQAVGRSSFYCLEYFPSQMLRTGNNFSFSYTFEDVPFHSSYAHSQSLDRLMNPLIDQYLYYLSRTQSTGGTAGTQQLLFSRAGPSNMSAQARNWLPGPCYRQQRVSTTLSQNNNSNFAWTGATKYHLNGRDSLVNPGVAMATNKDDEDRFFPSSGILMFGKQGAGKDNVDYSNVMLTSEEEIKTTNPVATEQYGVVADNLQQQNTAPTVGAVNSQGALPGMVWQNRDVYLQGPIWAKIPHTDGNFHPSPLMGGFGLKHPPPQILIKNTPVPADPPTAFNQAKLNSFIAQYSTGQVSVEIEWELQKENSKRWNPEIQYTSNYYKSTNADFAVNTEGVYSEPRPIGTRYLTRNL

SEQ ID NO: 252 - DNA, 2217 bp, Adeno-associated virus
atggctgccgatggttatcttccagattggctcgaggacaacctctctgagggcattcgcgagtggtgggacctgaaacctggagccccgaaacccaaagccaaccagcaaaagcaggacgacggccggggtctggtgcttcctggctacaagtacctcggacccttcaacggactcgacaagggggagcccgtcaacgcggcggacgcagcggccctcgagcacgacaaggcctacgaccagcagctcaaagcgggtgacaatccgtacctgcggtataatcacgccgacgccgagtttcaggagcgtctgcaagaagatacgtcttttgggggcaacctcgggcgagcagtcttccaggccaagaagcgggttctcgaacctctcggtctggttgaggaaggcgctaagacggctcctggaaagaagagaccggtagagccgtcaccacagcgttcccccgactcctccacgggcatcggcaagaaaggccagcagcccgccagaaagagactcaatttcggtcggactggcgactcagagtcagtccccgaccctcaacctatcggagaacctccagcagcgccctctagtgtgggatctggtacaatggctgcaggcggtggcgcaccaatggcagacaataacgaaggtgccgacggagtgggtagttcctcgggaaattggcattgcgattccacatggctgggcgacagagttatcaccaccagcacccgaacctgggccctgcccacctacaacaaccacctctacaagcaaatctccaacgggacctcgggaggcagcaccaacgacaacacctactttggctacagcaccccctgggggtatcttgactttaacagattccactgccacttctcaccacgtgactggcagcgactcatcaacaacaactggggattccggcccaagagactcagcttcaagctcttcaacatccaggtcaaagaggtcacgcagaatgaaggcaccaagaccatcgccaataacctcgccagcaccatccaggtgtttacggactcggaataccagccgccgtacgtcctcggctctgcccaccagggctgcctgcctccgttcccggcggacgtcttcatgattcctcagtacggctacctgactctcaacaacggtagtcaggccgtgggacgttcctccttctactgcctggagtacttcccctctcagatgctgagaacgggcaacaacttttccttcagctacactttcgaggacgtgcctttccacagcagctacgcgcacagccagagtttggacaggctgatgaatcctctcatcgaccagtacctgtactacctgtcaagaacccagtctacgggaggcacagcgggaacccagcagttgctgttttctcgggccgggcctagcaacatgtcggctcaggccagaaactggctgcctggaccctgctacagacagcagcgcgtctccacgacactgtcgcaaaacaacaacagcaactttgcctggactggtgccaccaagtatcatctgaacggcagagactctctggtgaatccgggcgtcgccatggcaaccaacaaggacgacgaggaccgcttcttcccatccagcggcatcctcatgtttggcaagcagggagctggaaaagacaacgtggactatagcaacgtgatgctaaccagcgaggaagaaatcaagaccaccaaccccgtggccacagaacagtatggcgtggtggctgataacctacagcagcaaaacaccgctcctactgtgggggccgtcaacagccagggagccttacctggcatggtctggcagaaccgggacgtgtacctgcagggtcctatttgggccaagattcctcacacagatggcaactttcacccgtctcctttaatgggcggctttggacttaaacatccgcctcctcagatcctcatcaaaaacactcctgttcctgcggatcctccaacagcgttcaaccaggccaagctgaattctttcatcgcgcagtacagcaccggacaagtcagcgtggagatcgagtgggagctgcagaaggagaacagcaagcgctggaacccagagattcagtatacttccaactactacaaatctacaaatgcggactttgctgttaatactgagggtgtttactctgagcctcgccccattggcactcgttacctcacccgtaatctgtaa

SEQ ID NO: 253 - DNA, 2208 bp, Adeno-associated virus
atggctgccgatggttatcttccagattggctcgaggacactctctctgaaggaataagacagtggtggaagctcaaacctggcccaccaccaccaaagcccgcagagcggcataaggacgacagcaggggtcttgtgcttcctgggtacaagtacctcggacccttcaacggactcgacaagggggagccggtcaacgaggcagacgccgcggccctcgagcacgacaaggcctacgaccggcagctcgacagcggagacaacccgtacctcaagtacaaccacgccgacgcagagtttcaggagcgccttaaagaagatacgtcttttgggggcaacctcggacgagcagtcttccaggcgaaaaagagggttcttgaacctctgggcctggttgaggagcctgttaagacggctccgggaaaaaagaggccggtagagcactctcctgtggagccagactcctcctcgggaaccggaaaagcgggccagcagcctgcaagaaaaagattaaattttggtcagactggagacgcagactccgtacctgacccccagcctctcggacagccaccagcagccccctctggtctgggatctactacaatggctacaggcagtggcgcaccaatggcagacaataacgagggtgccgatggagtgggtaattcctcaggaaattggcattgcgattcccaatggctgggcgacagagtcatcaccaccagcacccgaacctgggccctgcccacatacaacaaccacctctacaagcaaatctccagccaatcaggagccagcaacgacaaccactactttggctacagcaccccctgggggtattttgacttcaacagattccactgccacttttcaccacgtgactggcaaagactcgtcaacaacaaccggggattccggcccaaaagactcaacttcaagctctttaatattcaagtcaaagaggtcacgcagaatgacggtacgacgacgattgccaataaccttaccagcacggttcaggtgtttactgactcggagtaccagctcccgtacgtcctgggctcggcgcatcaaggatgcctcccgccgtttccagcggacgtcttcatggtcccacagtatggatacctcaccctgaacaacgggagtcaggcggtaggacgctcttccttttactgcctggagtactttccttctcagatgctgcgtactggaaacaactttcagttcagctacacttttgaagacgtgcctttccacagcagctacgctcacagccagagtctggatcggctgatgaatcctctgatcgaccagtacctgtattatctgaacaagacacaaacaaatagtggaactcttcagcagtctcggctactgtttagccaagctggaccaaccaacatgtctcttcaagctaaaaactggctgcctggaccttgctacagacagcagcgtctgtcaaaacaggcaaacgacaacaacaacagcaactttccctggactgcagctacaaagtatcatctaaatggccgggactcgttggttaatccaggaccagctatggccagtcacaaggatgacgaagaaaagtttttccccatgcatggaaccctgatatttggtaaacaaggaacaaatgccaacgacgcggatttggaaaatgtcatgattacagatgaagaagaaatcagggccaccaatcccgtggctacggagcagtacgggactgtgtcaaataatttgcaaaactcaaacactggtccaactactggaactgtcaatcaccaaggagcgttacctggtatggtgtggcaggatcgagacgtgtacctgcagggacccatttgggccaagattcctcacaccgatggacactttcatccttctccactgatgggaggttttggactcaaacacccgcctcctcagatcatgatcaaaaacactcccgttccagccaatcctcccacaaacttcagttctgccaagtttgcttctttcatcacacagtattccacgggacaggtcagcgtggagatcgagtgggagctgcagaaggagaacagcaaacgctggaatcccgaaattcagtacacttccaactacaacaagtctgttaatgtggactttactgtggacactaatggtgtgtattcagagcctcgccccattggcaccagatacctgactcgtaatctgtaa

SEQ ID NO: 254 - protein, 735 aa, Adeno-associated virus
MAADGYLPDWLEDTLSEGIRQWWKLKPGPPPPKPAERHKDDSRGLVLPGYKYLGPFNGLDKGEPVNEADAAALEHDKAYDRQLDSGDNPYLKYNHADAEFQERLKEDTSFGGNLGRAVFQAKKRVLEPLGLVEEPVKTAPGKKRPVEHSPVEPDSSSGTGKAGQQPARKRLNFGQTGDADSVPDPQPLGQPPAAPSGLGSTTMATGSGAPMADNNEGADGVGNSSGNWHCDSQWLGDRVITTSTRTWALPTYNNHLYKQISSQSGASNDNHYFGYSTPWGYFDFNRFHCHFSPRDWQRLVNNNRGFRPKRLNFKLFNIQVKEVTQNDGTTTIANNLTSTVQVFTDSEYQLPYVLGSAHQGCLPPFPADVFMVPQYGYLTLNNGSQAVGRSSFYCLEYFPSQMLRTGNNFQFSYTFEDVPFHSSYAHSQSLDRLMNPLIDQYLYYLNKTQTNSGTLQQSRLLFSQAGPTNMSLQAKNWLPGPCYRQQRLSKQANDNNNSNFPWTAATKYHLNGRDSLVNPGPAMASHKDDEEKFFPMHGTLIFGKQGTNANDADLENVMITDEEEIRATNPVATEQYGTVSNNLQNSNTGPTTGTVNHQGALPGMVWQDRDVYLQGPIWAKIPHTDGHFHPSPLMGGFGLKHPPPQIMIKNTPVPANPPTNFSSAKFASFITQYSTGQVSVEIEWELQKENSKRWNPEIQYTSNYNKSVNVDFTVDTNGVYSEPRPIGTRYLTRNL

SEQ ID NO: 255 - protein, 738 aa, Adeno-associated virus
MAADGYLPDWLEDNLSEGIREWWDLKPGAPKPKANQQKQDDGRGLVLPGYKYLGPFNGLDKGEPVNAADAAALEHDKAYDQQLKAGDNPYLRYNHADAEFQERLQEDTSFGGNLGRAVFQAKKRVLEPLGLVEEAAKTAPGKKRPVEPSPQRSPDSSTGIGKKGQQPAKKRLSFGQTGDSESVPDPQPIGEPPAGPSGLGSGTMAAGGGAPMADNNEGADGVGSSSGNWHCDSTWLGDRVITTSTRTWALPTYNNHLYKQISNGTSGGSTNDNTYFGYSTPWGYFDFNRFHCHFSPRDWQRLINNNWGFRPKRLSFKLFNIQVKEVTQNEGTKTIANNLTSTIQVFTDSEYQLPYVLGSAHQGCLPPFPADVFMIPQYGYLTLNNGSQAVGRSSFYCLEYFPSQMLRTGNNSEFSYTFEDVPFHSSYAHSQSLDRLMNPLIDQYLYYLSRTQSTGGTQGTQQLLFSQAGPANMSAQAKNWLPGPCYRQQRVSTTLSQNNNSNFAWTGATKYHLNGRDSLVNPGVAMATHKDDEERFFPSSGVLMFGKQGAGRDNVDYSSVMLTSEEEIKTTNPVATEQYGVVADNLQQTNTGPIVGNVNSQGALPGMVWQNRDVYLQGPIWAKIPHTDGNFHPSPLMGGFGLKHPPPQILIKNTPVPADPPTTFSQAKLASFITQYSTGQVSVEIEWELQKENSKRWNPEIQYTSNYYKSTNVDFAVNTEGTYSEPRPIGTRYLTRNL

SEQ ID NO: 256 - DNA, 2217 bp, Adeno-associated virus
atggctgctgacggttatcttccagattggctcgaggacaacctctctgagggcattcgcgagtggtgggacctgaaacctggagcccccaagcccaaggccaaccagcagaagcaggacgacggccggggtctggtgcttcctggctacaagtacctcggacccttcaacggactcgacaagggggagcccgtcaacgcggcggacgcagcggccctcgagcacgacaaggcctacgaccagcagctcaaagcgggtgacaatccgtacctgcggtataaccacgccgacgccgagtttcaggagcgtctgcaagaagatacgtcttttgggggcaacctcgggcgagcagtcttccaggccaagaagcgggttctcgaacctctcggtctggttgaggaagctgctaagacggctcctggaaagaagagaccggtagaaccgtcacctcagcgttcccccgactcctccacgggcatcggcaagaaaggccagcagcccgctaaaaagagactgagctttggtcagactggcgactcagagtcagtccccgaccctcaaccaatcggagaaccaccagcaggcccctctggtctgggatctggtacaatggctgcaggcggtggcgctccaatggcagacaataacgaaggcgccgacggagtgggtagttcctcaggaaattggcattgcgattccacatggctgggcgacagagtcatcaccaccagcacccgaacctgggccctgcccacctacaacaaccacctctacaagcaaatatccaatgggacatcgggaggaagcaccaacgacaacacctacttcggctacagcaccccctgggggtattttgacttcaacagattccactgccacttctcaccacgtgactggcagcgactcatcaacaacaactggggattccggccaaaaagactcagcttcaagctcttcaacatccaggtcaaggaggtcacgcagaatgaaggcaccaagaccatcgccaataaccttaccagcacgattcaggtatttacggactcggaataccagctgccgtacgtcctcggctccgcgcaccagggctgcctgcctccgttcccggcggacgtcttcatgattccccagtacggctaccttacactgaacaatggaagtcaagccgtaggccgttcctccttctactgcctggaatattttccatctcaaatgctgcgaactggaaacaattctgaattcagctacaccttcgaggacgtgcctttccacagcagctacgcacacagccagagcttggaccgactgatgaatcctctcatcgaccagtacctgtactacttatccagaactcagtccacaggaggaactcaaggtacccagcaattgttattttctcaagctgggcctgcaaacatgtcggctcaggctaagaactggctacctggaccttgctaccggcagcagcgagtctctacgacactgtcgcaaaacaacaacagcaactttgcttggactggtgccaccaaatatcacctgaacggaagagactctttggtaaatcccggtgtcgccatggcaacccacaaggacgacgaggaacgcttcttcccgtcgagtggagtcctgatgtttggaaaacagggtgctggaagagacaatgtggactacagcagcgttatgctaaccagcgaagaagaaattaaaaccactaaccctgtagccacagaacaatacggtgtggtggctgacaacttgcagcaaaccaatacagggcctattgtgggaaatgtcaacagccaaggagccttacctggcatggtctggcagaaccgagacgtgtacctgcagggtcccatctgggccaagattcctcacacggacggcaacttccacccttcaccgctaatgggaggatttggactgaagcacccacctcctcagatcctgatcaagaacacgccggtacctgcggatcctccaacaacgttcagccaggcgaaattggcttccttcattacgcagtacagcaccggacaggtcagcgtggaaatcgagtgggagctgcagaaggagaacagcaaacgctggaacccagagattcagtacacttcaaactactacaaatctacaaatgtggactttgctgtcaatacagagggaacttattctgagcctcgccccattggtactcgttacctcacccgtaatctgtaa

SEQ ID NO: 257 - protein, 738 aa, Adeno-associated virus
MAADGYLPDWLEDNLSEGIREWWDLKPGAPKPKANQQKQDDGRGLVLPGYKYLGPFNGLDKGEPVNAADAAALEHDKAYDQQLKAGDNPYLRYNHADAEFQERLQEDTSFGGNLGRAVFQAKKRVLEPLGPVEEAAKTAPGKKRPVEPPPQRSPDSSTGIGKKGQQPAKKRLNFGQTGDSESVPDPQPIGEPPAGPSGLGSGTMAAGGGAPMADNNEGADGVGSSSGNWHCDSTWLGDRVITTSTRTWALPTYNNHLYKQISNGTSGGSTNDNTYFGYSTPWGYFDFNRFHCHFSPRDWQRLINNNWGFRPKRLSFKLFNIQVKEVTQNEGTKTVANNLTSTIQVFTDSEYQLPYVLGSAHQGCLPPFPADVFMIPQYGYLTLNNGSQAVGRSSFYCLEYFPSQMLRTGNNFEFSYTFEDVPFHSSYAHSQSLDRLMNPLIDQYLYYLSRTQSTGGTQGTQQLLFSQAGPANMSAQAKNWLPGPCYRQQRVSTTLSQNNNSNFAWTGATKYHLNGRDSLVNPGVAMATHKDDEERFFPSSGVLMFGKQGAGRDNVDYSSVMLTSEEEIKTTNPVATEQYGVVADNLQQTNTGPIVGNVNSQGALPGMVWQNRDVYLQGPIWAKIPHTDGNFHPSPLMGGFGLKHPPPQILIKNTPVPADPPTTFSQAKLASFITQYSTGQVSVEIEWELQKENSKRWNPEIQYTSNYYKSTNVDFAVNTEGTYSEPRPIGTRYLTRNL

SEQ ID NO: 258 - DNA, 2217 bp, Adeno-associated virus
atggctgctgacggttatcttccagattggctcgaggacaacctctctgagggcattcgcgagtggtgggacctgaaacctggagcccccaagcccaaggccaaccagcagaagcaggacgacggccggggtctggtgcttcctggctacaagtacctcggacccttcaacggactcgacaagggggagcccgtcaacgcggcggacgcagcggccctcgagcacgacaaggcctacgaccagcagctcaaagcgggtgacaatccgtacctgcggtataaccacgccgacgccgagtttcaggagcgtctacaagaagatacgtcttttgggggcaacctcgggcgagcagtcttccaggccaagaagcgggttctcgaacctctcggtccggttgaggaagctgctaagacggctcctggaaagaagagaccggtagaaccgccacctcagcgttcccccgactcctccacgggcatcggcaagaaaggccagcagcccgctaaaaagagactgaactttggtcagactggcgactcagagtcagtccccgaccctcaaccaatcggagaaccaccagcaggcccctctggtctgggatctggtacaatggctgcaggcggtggcgctccaatggcagacaataacgaaggcgccgacggagtgggtagttcctcaggaaattggcattgcgattccacatggctgggcgacagagtcatcaccaccagcacccgaacctgggccctgcccacctacaacaaccacctctacaagcaaatatccaatgggacatcgggaggaagcaccaacgacaacacctacttcggctacagcaccccctgggggtattttgacttcaacagattccactgccacttctcaccacgtgactggcagcgactcatcaacaacaactggggattccggccaaaaagactcagcttcaagctcttcaacatccaggtcaaggaggtcacgcagaatgaaggcaccaagaccgtcgccaataaccttaccagcacgattcaggtatttacggactcggaataccagctgccgtacgtcctcggctccgcgcaccagggctgcctgcctccgttcccggcggacgtcttcatgattccccagtacggctaccttacactgaacaatggaagtcaagccgtaggccgttcctccttctactgcctggaatattttccatctcaaatgctgcgaactggaaacaattttgaattcagctacaccttcgaggacgtgcctttccacagcagctacgcacacagccagagcttggaccgactgatgaatcctctcatcgaccagtacctgtactacttatccagaactcagtccacaggaggaactcaaggtacccagcaattgttattttctcaagctgggcctgcaaacatgtcggctcaggctaagaactggctacctggaccttgctaccggcagcagcgagtctctacgacactgtcgcaaaacaacaacagcaactttgcttggactggtgccaccaaatatcacctgaacggaagagactctttggtaaatcccggtgtcgccatggcaacccacaaggacgacgaggaacgcttcttcccgtcgagtggagtcctgatgtttggaaaacagggtgctggaagagacaatgtggactacagcagcgttatgctaaccagcgaagaagaaattaaaaccactaaccctgtagccacagaacaatacggtgtggtggctgacaacttgcagcaaaccaatacagggcctattgtgggaaatgtcaacagccaaggagccttacctggcatggtctggcagaaccgagacgtgtacctgcagggtcccatctgggccaagattcctcacacggacggcaacttccacccttcaccgctaatgggaggatttggactgaagcacccacctcctcagatcctgatcaagaacacgccggtacctgcggatcctccaacaacgttcagccaggcgaaattggcttccttcattacgcagtacagcaccggacaggtcagcgtggaaatcgagtgggagctgcagaaggagaacagcaaacgttggaacccagagattcagtacacttcaaactactacaaatctacaaatgtggactttgctgtcaatacagagggaacttattctgagcctcgccccattggtactcgttacctcacccgtaatctgtaa

SEQ ID NO: 259 - protein, 738 aa, Adeno-associated virus
MAADGYLPDWLEDNLSEGIREWWDLKPGAPKPKANQQKQDDGRGLVLPGYKYLGPFNGLDKGEPVNAADAAALEHDKAYDQQLKAGDNPYLRYNHADAEFQERLQEDTSFGGNLGRAVFQAKKRVLEPLGLVEEAAKTAPGKKRPVEPSPQRSPDSSTGIGKKGQQPAKKRLNFGQTGDSESVPDPQPIGEPPAGPSGLGSGTMAAGGGAPMADNNEGADGVGSSSGNWHCDSTWLGDRVITTSTRTWALPTYNNHLYKQISNGTSGGSTNDNTYFGYSTPWGYFDFNRFHCHFSPRDWQRLINNNWGFRPKRLSFKLFNIQVKEVTQNEGTKTIANNLTSTIQVFTDSEYQLPYVLGSAHQGCLPPFPADVFMIPQYGYLTLNNGSQAVGRSSFYCLEYFPSQMLRTGNNFEFSYTFEDVPFHSSYAHSQSLDRLMNPLIDQYLYYLSRTQSTGGTQGTQQLLFSQAGPANMSAQAKNWLPGPCYRQQRVSTTLSQSNNSNFAWTGATKYHLNGRDSLVNPGVAMATHKDDEERFFPSSGVLMFGKQGAGRDNVDYSSVMLTSEEEIKTTNPVATEQYGVVADNLQQTNTGPIVGNVNSQGALPGMVWQNRDVYLQGPIWAKIPHTDGNFHPSPLMGGLGLKHPPPQILIKNTPVPADPPTTFSQAKLASFITQYSTGQVSVEIEWELQKENSKRWNPEIQYTSNYYKSTNVDFAVNTEGTYSEPRPIGTRYLTRNL

SEQ ID NO: 260 - DNA, 2217 bp, Adeno-associated virus
atggctgctgacggttatcttccagattggctcgaggacaacctctctgagggcattcgcgagtggtgggacctgaaacctggagcccccaagcccaaggccaaccagcagaagcaggacgacggccggggtctggtgcttcctggctacaagtacctcggacccttcaacggactcgacaagggggagcccgtcaacgcggcggacgcagcggccctcgagcacgacaaggcctacgaccagcagctcaaagcgggtgacaatccgtacctgcggtataaccacgccgacgccgagtttcaggagcgtctgcaagaagatacgtcttttgggggcaacctcgggcgagcagtcttccaggccaagaagcgggttctcgaacctctcggtctggttgaggaagcggctaagacggctcctggaaagaagagaccggtagaaccgtcacctcagcgttcccccgactcctccacgggcatcggcaagaaaggccagcagcccgctaaaaagagactgaactttggtcagactggcgactcagagtcagtccccgaccctcaaccaatcggagaaccaccagcaggcccctctggtctgggatctggtacaatggctgcaggcggtggcgctccaatggcagacaataacgaaggcgccgacggagtgggtagttcctcaggaaattggcattgcgattccacatggctgggcgacagagtcatcaccaccagcacccgaacctgggccctgcccacctacaacaaccacctctacaagcaaatatccaatgggacatcgggaggaagcaccaacgacaacacctacttcggctacagcaccccctgggggtattttgacttcaacagattccactgccacttctcaccacgtgactggcagcgactcatcaacaacaactggggattccggccaaaaagactcagcttcaagctcttcaacatccaggtcaaggaggtcacgcagaatgaaggcaccaagaccatcgccaataaccttaccagcacgattcaggtatttacggactcggaataccagctgccgtacgtcctcggctccgcgcaccagggctgcctgcctccgttcccggcggacgtcttcatgattccccagtacggctaccttacactgaacaatggaagtcaagccgtaggccgttcctccttctactgcctggaatattttccatctcaaatgctgcgaactggaaacaattttgaattcagctacaccttcgaggacgtgcctttccacagcagctacgcacacagccagagcttggaccgactgatgaatcctctcatcgaccagtacctgtactacttatccagaactcagtccacaggaggaactcaaggtacccagcaattgttattttctcaagctgggcctgcaaacatgtcggctcaggctaagaactggctacctggaccttgctaccggcagcagcgagtctctacgacactgtcgcaaagcaacaacagcaactttgcttggactggtgccaccaaatatcacctgaacggaagagactctttggtaaatcccggtgtcgccatggcaacccacaaggacgacgaggaacgcttcttcccgtcgagtggagtcctgatgtttggaaaacagggtgctggaagagacaatgtggactacagcagcgttatgctaaccagcgaagaagaaattaaaaccactaaccctgtagccacagaacaatacggtgtggtggctgacaacttgcagcaaaccaatacagggcctattgtgggaaatgtcaacagccaaggagccttacctggcatggtctggcagaaccgagacgtgtacctgcagggtcccatctgggccaagattcctcacacggacggcaacttccacccttcaccgctaatgggaggacttggactgaagcacccacctcctcagatcctgatcaagaacacgccggtacctgcggatcctccaacaacgttcagccaggcgaaattggcttccttcattacgcagtacagcaccggacaggtcagcgtggaaatcgagtgggagctgcagaaggagaacagcaaacgctggaacccagagattcagtacacttcaaactactacaaatctacaaatgtggactttgctgtcaatacagagggaacttattctgagcctcgccccattggtactcgttacctcacccgtaatctgtaa

SEQ ID NO: 261 - protein, 737 aa, Adeno-associated virus
MAADGYLPDWLEDNLSEGIREWWDLKPGAPKPKANQQKQDDGRGLVLPGYKYLGPFNGLDKGEPVNAADAAALEHDKAYDQQLKAGDNPYPRYNHADAEFQERLQEDTPFGGNLGRAVFQAKKRVLEPLGLVEEAAKTAPGKKRPVEPSPQRSPDSSTGIGKKGQQPAKKRLNFGQTGDSESVPDPQPIGEPPAGPSGLGSGTMAAGGGAPMADNNEGADGVGNASGNWHCDSTWLGDRVITTSTRTWALPTYNNHLYKQISSASTGASNDNHYFGYSTPWGYFDFNRFHCHFSPRDWQRLINNNWGFRPKRLNFKLFNIQVKEVTTNDGVTTIANNLTSTVQVFSDSEYQLPYVLGSAHQGCLPPFPADVFMIPQYGYLTLNNGSQAVGRSSFYCLEYFPSQMLRTGNNFTFSYTFEEVPLHSSYAHSQSLDRLMNPLIVQYLYYLNRTQNQSGSAQNKDLLFSRGSPAGMSVQPKNWLPGPCYRQQRVSKTKTDNNNSNFTWTGASKYNLNGRESIINPGTAMASHKDDEDKFFPMSGVMIFGKESAGASNTALDNVMITDEEEIKATNPVATERFGTVAVNFQSSSTDPATGDVHAMGALPGMVWQDRDVYLQGPIWAKIPHTDGHFHPSPLMGGFGLKNPPPQILIKNTPVPANPPAEFSATKFASFITQYSTGQVSVEIEWELQKENSKRWNPEVQYTSNYAKSASVDFTVDNNGLYTEPRPIGTRYLTRPL

SEQ ID NO: 262 - protein, 737 aa, Adeno-associated virus
MAADGYLPDWLEDNLSEGIREWWDLKPGAPKPKANQQKQDDGRGLVLPGYKYLGPFNGLDKGEPVNAADAAALEHDKAYDQQLKAGDNPYPRYNHADAEFQERLQEDTSFGGNLGRAVFQAKKRVLEPLGLVEEAAKTAPGKKRPVEPSPQRSPDSSTGIGKKGQQPAKKRLNFGQTGDSESVPDPQPIGEPPAGPSGLGSGTMAAGGGAPMADNNEGADGVGNASGNWHCDSTWLGDRVITTSTRTWALPTYNNHLYKQISSASTGASNDNHYFGYSTPWGYFDFNRFHCHFSPRDWQRLINNNWGFRPKRLNFKLFNIQVKEVTTNDGVTTIANNLTSTVQVFSDSEYQLPYVLGSAHQGCLPPFPADVFMIPQYGYLTLNNGSQAVGRSSFYCLEYFPSQMLRTGNNFTFSYTFEEVPLHSSYAHSQSLDRLMNPLIDQYLYYLNRTQNQSGSAQNKDLLFSRGSPAGMSVQPKNWLPGPCYRQQRVSKTKTDNNNSNFTWTGASKYNLNGRESIINPGTAMASHKDDEDKFFPMSGVMIFGKESAGASNTALDNVMITDEEEIKATNPVATERFGTVAVNFQSSSTDPATGDVHAMGALPGMVWQDRDVYLQGPIWAKIPHTDGHFHPSPLMGGFGLKNPPPQILIKNTPVPANPPAEFSATKFASFITQYSTGQVSVEIEWELQKENSKRWNPEVQYTSNYAKSASVDFTVDNNGLYTEPRPIGTRYLTRPL

SEQ ID NO: 263 - DNA, 2214 bp, Adeno-associated virus
atggctgctgacggttatcttccagattggctcgaggacaacctctctgagggcattcgcgagtggtgggacctgaaacctggagcccccaagcccaaggccaaccagcagaagcaggacgacggccggggtctggtgcttcctggctacaagtacctcggacccttcaacggactcgacaagggggagcccgtcaacgcggcggacgcagcggccctcgagcacgacaaggcctacgaccagcagctcaaagcgggtgacaatccgtacccgcggtataaccacgccgacgccgagtttcaggagcgtctgcaagaagatacgccttttgggggcaacctcgggcgagcagtcttccaggccaagaagcgggttctcgaacctctcggtctggttgaggaagctgctaagacggctcctggaaagaagagaccggtagaaccgtcacctcagcgttcccccgactcctccacgggcatcggcaagaaaggccagcagcccgctaaaaagagactgaactttggtcagactggcgactcagagtcagtccccgaccctcaaccaatcggagaaccaccagcaggcccctctggtctgggatctggtacaatggctgcaggcggtggcgctccaatggcagacaataacgaaggcgccgacggagtgggtaatgcctcaggaaattggcattgcgattccacatggctgggcgacagagtcatcaccaccagcacccgcacctgggccttgcccacctacaataaccacctctacaagcaaatctccagtgcttcaacgggggccagcaacgacaaccactacttcggctacagcaccccctgggggtattttgatttcaacagattccactgccacttttcaccacgtgactggcagcgactcatcaacaacaattggggattccggcccaagagactcaacttcaaactcttcaacatccaagtcaaggaggtcacgacgaatgatggcgtcacaaccatcgctaataaccttaccagcacggttcaagtcttctcggactcggagtaccagcttccgtacgtcctcggctctgcgcaccagggctgcctccctccgttcccggcggacgtgttcatgattccgcaatacggctacctgacgctcaacaatggcagccaagccgtgggacgttcatccttttactgcctggaatatttcccttctcagatgctgagaacgggcaacaactttaccttcagctacacctttgaggaagtgcctctccacagcagctacgcgcacagccagagcctggaccggctgatgaatcctctcatcgtccaatacctgtattacctgaacagaactcaaaatcagtccggaagtgcccaaaacaaggacttgctgttcagccgtgggtctccagctggcatgtctgttcagcccaaaaactggctacctggaccctgttatcggcagcagcgcgtttctaaaacaaaaacagacaacaacaacagcaattttacctggactggtgcttcaaaatataacctcaatgggcgtgaatccatcatcaaccctggcactgctatggcctcacacaaagacgacgaagacaagttctttcccatgagcggtgtcatgatttttggaaaagagagcgccggagcttcaaacactgcattggacaatgtcatgattacagacgaagaggaaattaaagccactaaccctgtggccaccgaaagatttgggaccgtggcagtcaatttccagagcagcagcacagaccctgcgaccggagatgtgcatgctatgggagcattacctggcatggtgtggcaagatagagacgtgtacctgcagggtcccatttgggccaaaattcctcacacagatggacactttcacccgtctcctcttatgggcggctttggactcaagaacccgcctcctcagatcctcatcaaaaacacgcctgttcctgcgaatcctccggcggagttttcagctacaaagtttgcttcattcatcacccaatactccacaggacaagtgagtgtggaaattgaatgggagctgcagaaagaaaacagcaagcgctggaatcccgaagtgcagtacacatccaattatgcaaaatctgccagcgttgattttactgtggacaacaatggactttatactgagcctcgccccattggcacccgttaccttacccgtcccctgtaa

SEQ ID NO: 264 - protein, 736 aa, Adeno-associated virus
MAADGYLPDWLEDTLSEGIRQWWKLRPGPPPPKPAERHKDDSRGLVLPGYKYLGPFNGLDKGEPVNEADAAALEHDKAYDRQLDSGDNPYLKYNHADAEFQERLKEDTSFGGNLGRAVFQAKKRVLEPLGLVEEGAETAPGKKRPVEQSPQGPDSSSGIGKTGQQPAKKRLNFGQTGDSESVPDPQPLGEPPATPAAVGPTTMASGGGAPMADNNEGADGVGNASGNWHCDSTWLGDRVITTSTRTWALPTYNNHLYKQISSASTGASNDNHYFGYSTPWGYFDFNRFHCHFSPRDWQRLINNNWGFRPKRLNFKLFNIQVKEVTTNDGVTTIANNLTSTVQVFSDSEYQLPYVLGSAHQGCLPPFPADVFMIPQYGYLTLNNGSQAVGRSSFYCLEYFPSQMLRTGNNFTFSYTFEEVPFHSSYAHSQSLDRLMNPLIDQYLYYPNRTQNQSGSAQNKDLLFSRGSPAGMSVQPKNWLPGPCYRQQRVSKTKTDNNNSNFTWTGASKYNLNGRESIINPGTAMASHKDDEDKFFPMSGVMIFGKESAGASNTALDNVMITDEEEIKATNPVATERFGTVAVNFQSSSTDPATGDVHAMGALPGMVWQGRDVYLQGPIWAKIPHTDGHFHPSPLMGGFGLKNPPPQILIKNTPVPANPPAEFSATKFASFITQYSTGQVSVEIEWELQKENSKRWNPEVQYTSNYAKSANVDFTVDNNGLYTEPRPIGTRYLTRPL

SEQ ID NO: 265 - DNA, 2211 bp, Adeno-associated virus
atggctgccgatggttatcttccagattggctcgaggacactctctctgaaggaataagacagtggtggaagctcagacctggcccaccaccaccaaagcccgcagagcggcataaggacgacagcaggggtcttgtgcttcctgggtacaagtacctcggacccttcaacggactcgacaagggagagccggtcaacgaggcagacgccgcggccctcgagcacgacaaagcctacgaccggcagctcgacagcggagacaacccgtacctcaagtacaaccacgccgacgcggagtttcaggagcgccttaaagaagatacgtcttttgggggcaacctcgggcgagcagtcttccaggccaagaagcgggttctcgaacctctcggtctggttgaggaaggcgctgagacggctcctggaaagaaacgtccggtagagcagtcgccacaagggccagactcctcctcgggcatcggcaagacaggccagcagcccgctaaaaagagactcaattttggtcagactggcgactcagagtcagtccccgatccacaacctctcggagaacctccagcaacccccgctgctgtgggacctactacaatggcttcaggcggtggcgcaccaatggcagacaataacgaaggcgccgacggagtgggtaatgcctcaggaaattggcattgcgattccacatggctgggcgacagagtcatcaccaccagcacccgcacctgggccttgcccacctacaataaccacctctacaagcaaatctccagtgcttcaacgggggccagcaacgacaaccactacttcggctacagcaccccctgggggtattttgatttcaacagattccactgccacttttcaccacgtgactggcagcgactcatcaacaacaattggggattccggcccaagagactcaacttcaaactcttcaacatccaagtcaaggaggtcacgacgaatgatggcgtcacaaccatcgctaataaccttaccagcacggttcaagtcttctcggactcggagtaccagcttccgtacgtcctcggctctgcgcaccagggctgcctccctccgttcccggcggacgtgttcatgattccgcaatacggctacctgacgctcaacaatggcagccaagccgtgggacgttcatccttttactgcctggaatatttcccttctcagatgctgagaacgggcaacaactttaccttcagctacacctttgaggaagtgcctttccacagcagctacgcgcacagccagagcctggaccggctgatgaatcctctcatcgaccaatacctgtattacccgaacagaactcaaaatcagtccggaagtgcccaaaacaaggacttgctgtttagccgtgggtctccagctggcatgtctgttcagcccaaaaactggctacctggaccctgttatcggcagcagcgcgtttctaaaacaaaaacagacaacaacaacagcaattttacctggactggtgcttcaaaatataacctcaatgggcgtgaatccatcatcaaccctggcactgctatggcctcacacaaagacgacgaagacaagttctttcccatgagcggtgtcatgatttttggaaaagagagcgccggagcttcaaacactgcattggacaatgtcatgattacagacgaagaggaaattaaagccactaaccctgtggccaccgaaagatttgggaccgtggcagtcaatttccagagcagcagcacagaccctgcgaccggagatgtgcatgctatgggagcattacctggcatggtgtggcaaggtagagacgtgtacctgcagggtcccatttgggccaaaattcctcacacagatggacactttcacccgtctcctcttatgggcggctttggactcaagaacccgcctcctcagatcctcatcaaaaacacgcctgttcctgcgaatcctccggcggagttttcagctacaaagtttgcttcattcatcacccaatactccacaggacaagtgagtgtggaaattgaatgggagctgcagaaagaaaacagcaagcgctggaatcccgaagtgcagtacacatccaattatgcaaaatctgccaacgttgattttactgtggacaacaatggactttatactgagcctcgccccattggcacccgttaccttacccgtcccctgtaa

SEQ ID NO: 266 - protein, 736 aa, Adeno-associated virus
MAADGYLPDWLEDTLSEGIRQWWKLRPGPPPPKPAERHKDDSRGLVLPGYKYLGPFNGLDKGEPVNEADAAALEHDKAYDRQLDSGDNPYLKYNHADAEFQERLKEDTSFGGNLGRAVFQAKKRVLEPLGLVEEGAKTAPGKKRPVEQSPQGPDSSSGIGKTGQQPAKKRLNFGQTGDSESVPDPQPLGEPPATPAAVGPTTMASGGGAPMADNNEGADGVGNASGNWHCDSTWLGDRVITTSTRTWALPTYNNHLYKQISSASTGASNDNHYFGYSTPWGYFDFNRFHCHFSPRDWQRLINNNWGFRPKRLNFKLFNIQVKEVTTNDGVTTIANNLTSTVQVFSDSEYQLPYVLGSAHQGCLPPFPADVFMIPQYGYLTLNNGSQAVGRSSFYCLEYFPSQMLRTGNNFTFSYTFEEVPFHSSYAHSQSLDRLMNPLIDQYLYYPNRTQNQSGSAQNKDLLFSRGSPAGMSVQPKNWLPGPCYRQQRVSKTKTDNNNSNFTWTGASKYNLNGRESIINPGTAMASHKDDEDKFFPMSGVMIFGKESAGASNTALDNVMITDEEEIKATNPVATERFGTVAVNFQSSSTDPATGDVHAMGALPGMVWQGRDVYLQGPIWAKIPHTDGHFHPSPLMGGFGLKNPPPQILIKNTPVPANPPAEFSATKFASFITQYSTGQVSVEIEWELQKENSKRWNPEVQYTSNYAKSANVDFTVDNNGLYTEPRPIGTRYLTRPL

SEQ ID NO: 267 - protein, 736 aa, Adeno-associated virus
MAADGYLPDWLEDTLSEGIRQWWKLRPGPPPPKPAERHKDDSRGLVLPGYKYLGPFNGLDKGEPVNEADAAALEHDKAYDRQLDSGDNPYLKYNHADAEFQERLKEDTSFGGNLGRAVFQAKKRVLEPLGLVEEGAKTAPGKKRPVEQSPQGPDSSSGIGKTGQQPAKKRLNFGQTGDSESVPDPQPLGEPPATPAAVGPTTMASGGGAPMADNNEGADGVGNASGNWHCDSTWLGDRVITTSTRTWALPTYNNHLYKQISSASTGASNDNHYFGYSTPWGYFDFNRFHCHFSPRDWQRLINNNWGFRPKRLNFKLFNIQVKEVTTNDGVTTIANNLTSTVQVFSDSEYQLPYVLGSAHQGCLPPFPADVFMIPQYGYLTLNNGSQAVGRSSFYCLEYFPSQMLRTGNNFTFSYTFEEVPFHSSYAHSQSLDRLMNPLIDQYLYYLNRTQNQSGSAQNKDLLFSRGSPAGMSVQPKNWLPGPCYRQQRVSKTKTDNNNSNFTWTGASKYNLNGRESIINPGTAMASHKDDEDKFFPMSGVMIFGKESAGASNTALDNVMITDEEEIKATNPVATERFGTVAVNFQSSSTDPATGDVHAMGALPGMVWQGRDVYLQGPIWAKIPHTDGHFHPSPLMGGFGLKNPPPQILIKNTPVPANPPAEFSATKFASFITQYSTGQVSVEIEWELQKENSKRWNPEVQYTSNYAKSANVDFTVDNNGLYTEPRPIGTRYLTRPL

SEQ ID NO: 268 - protein, 736 aa, Adeno-associated virus
MAADGYLPDWLEDTLSEGIRQWWKLRPGPPPPKPAERHKDDSRGLVLPGYKYLGPFNGLDKGEPVNEADAAALEHDKAYDRQLDSGDNPYLKYNHADAEFQERLKEDTSFGGNLGRAVFQAKKRVLEPLGLVEEGAKTAPGKKRPVEQSPQGPDSSSGIGKTGQQPAKKRLNFGQTGDSESVPDPQPLGEPPATPAAVGPTTMASGGGAPMADNNEGADGVGNASGNWHCDSTWLGDRVITTSTRTWALPTYNNHLYKQISSASTGASNDNHYFGYSTPWGYFDFNRFHCHFSPRDWQRLINNNWGFRPKRLNFKLFNIQVKEVTTNDGVTTIANNLTSTVQVFSDSEYQLPYVLGSAHQGCLPPFPADVFMIPQYGYLTLNNGSQAVGRSSFYCLEYFPSQMLRTGNNFTFSYTFEEVPFHSSYAHSQSLDRLMNPLIDQYLYYLNRTQNQSGSAQNKDLLFSRGSPAGMSVQPKNWLPGPCYRQQRVSKTKTDNNNSNFTWTGASKYNLNGRESIINPGTAMASHKDDEDKFFPMSGVMIFGKESAGASNTALDNVMITDEEEIKATNPVATERFGTVAVNFQSSSTDPATGDVHAMGALPGMVWQDRDVYLQGPIWAKIPHTDGHFHPSPLMGGFGLKNPPPQILIKNTPVPANPPAEFSATKFASFITQYSTGQVSVEIEWELQKENSKRWNPEVQYTSNYAKSANVDFTVDNNGLYTEPRPIGTRYLTRPL

SEQ ID NO: 269 - DNA, 2208 bp, Adeno-associated virus
atggctgccgatggctatcttccagattggctcgaggacactctctctgaaggaataagacagtggtggaagctcaaacctggcccaccaccaccaaagcccgcagagcggcatagggacgacagcaggggtcttgtgcttcctgggtacaagtacctcggacccttcaacggactcgacaagggagagccggtcaacgaggcagacgccgcggccctcgagcacgacaaagcctacgaccggcagctcgacagcggagacaacccgtacctcaagtacaaccacgccgacgcggagtttcaggagcgccttaaagaagatacgtcttttgggggcaacctcggacgagcagtcttccaggcgaaaaagagggttcttgaacctctgggcctggttgaggaacctgttaagacggctccgggaaaaaagaggccggtagagcactctcctgtggagccagactcctcctcgggaaccggaaaggcgggccagcagcctgcaagaaaaagattgaattttggtcagactggagacgcagactcagtacctgacccccagcctctcggacagccaccagcagccccctctggtctgggaactaatacgatggctacaggcagtggcgcaccaatggcagacaataacgagggcgccgacggagtgggtaattcctcgggaaattggcattgcgattccacatggatgggcgacagagtcatcaccaccagcacccgaacctgggccctgcccacctacaacaaccacctctacaaacaaatttccagccaatcaggagcctcgaacgacaatcactactttggctacagcaccccttgggggtattttgacttcaacagattccactgccacttttcaccacgtgactggcaaagactcatcaacaacaactggggattccgacccaagagactcaacttcaagctctttaacattcaagtcaaagaggtcacgcagaatgacggtacgacgacgattgccaataaccttaccagcacggttcaggtgtttactgactcggggtaccagctcccgtacgtcctcggctcggcgcatcaaggatgcctcccgccgttcccagcagacgtcttcatggtgccacagtatggataccccaccctgaacaacgggagtcaggcagtaggacgctcttcattttactgcctggagtactttccttctcagatgctgcgtaccggaaacaactttaccttcagctacacttttgaggacgttcctttccacagcagctacgctcacagccagagtctggaccgtctcatgaatcctctcatcgaccagtacctgtattacttgagcacaacaaacactccaagtggaaccaccacgcagtcaaggcttcagttttctcaggccggagcgagtgacattcgggaccagtctaggaactggcttcctggaccctgttaccgccagcagcgagtatcaaagacatctgcggataacaacaacagtgaatactcgtggactggagctaccaagtaccacctcaatggcagagactctctggtgaatccgggcccggccgtggcaagccacaaggacgatgaagaaaagttttttcctcagagcggggttctcatctttgggaagcaaggctcagagaaaacaaatgtggacattgaaaaggtcatgattacagacgaagaggaaatcaggacaaccaatcccgtggctacggagcagtatggttctgtatctaccaacctccagagaggcaacagacaagcagctaccgcagatgtcaacacacaaggcgttcttccaggcatggtctggcaggacagagatgtgtaccttcaggggcccatctgggcaaagattccacacacggacggacattttcacccctctcccctcatgggtggattcggacttaaacaccctcctccacagattctcatcaagaacaccccggtacctgcgaatccttcgaccaccttcagtgcggcaaagtttgcttccttcatcacacagtactccacgggacaggtcagcgtggagatcgagtgggagctgcagaaggaaaacagcaaacgctggaatcccgaaattcagtacacttccaactacaacaagtctgttaatgtggactttactgtggacactaatggcgtgtattcagagcctcgccccattggcaccagatacctgactcgtaatctgtaa

SEQ ID NO: 270 - protein, 735 aa, Adeno-associated virus
MAADGYLPDWLEDTLSEGIRQWWKLKPGPPPPKPAERHRDDSRGLVLPGYKYLGPFNGLDKGEPVNEADAAALEHDKAYDRQLDSGDNPYLKYNHADAEFQERLKEDTSFGGNLGRAVFQAKKRVLEPLGLVEEPVKTAPGKKRPVEHSPVEPDSSSGTGKAGQQPARKRLNFGQTGDADSVPDPQPLGQPPAAPSGLGTNTMATGSGAPMADNNEGADGVGNSSGNWHCDSTWMGDRVITTSTRTWALPTYNNHLYKQISSQSGASNDNHYFGYSTPWGYFDFNRFHCHFSPRDWQRLINNNWGFRPKRLNFKLFNIQVKEVTQNDGTTTIANNLTSTVQVFTDSGYQLPYVLGSAHQGCLPPFPADVFMVPQYGYPTLNNGSQAVGRSSFYCLEYFPSQMLRTGNNFTFSYTFEDVPFHSSYAHSQSLDRLMNPLIDQYLYYLSTTNTPSGTTTQSRLQFSQAGASDIRDQSRNWLPGPCYRQQRVSKTSADNNNSEYSWTGATKYHLNGRDSLVNPGPAVASHKDDEEKFFPQSGVLIFGKQGSEKTNVDIEKVMITDEEEIRTTNPVATEQYGSVSTNLQRGNRQAATADVNTQGVLPGMVWQDRDVYLQGPIWAKIPHTDGHFHPSPLMGGFGLKHPPPQILIKNTPVPANPSTTFSAAKFASFITQYSTGQVSVEIEWELQKENSKRWNPEIQYTSNYNKSVNVDFTVDTNGVYSEPRPIGTRYLTRNL

SEQ ID NO: 271 - DNA, 2211 bp, Adeno-associated virus
atggctgccgacggttatcttccagattggctcgaggacactctctctgaaggaataagacagtggtggaagctcaaacctggcccaccaccaccaaagcccgcagagcggcataaggacgacagcaggggtcttgtgcttcctgggtacaagtacctcggacccttcaacggactcgacaagggagagccggtcaacgaggcagacgccgcggccctcgagcacgacaaagcctacgaccggcagctcgacagcggagacaacccgtacctcaagtacaaccacgccgacgcggagtttcaggagcgccttaaagaagatacgtcttttgggggcaacctcgggcgggcagtcttccaggccaagaagcgggttctcgaacctctcggtctggttgaggaaggcgctaagacggctcctggaaagaaacgtccggtagagcagtcgccacaagagccagactccccctcgggcatcggcaagacaggccagcagcccgctaaaaagagactcaattttggtcagactggcgactcagagtcagtccccgatccacaacctctcggagaacctccagcaacccccgctgctgtgggacctactacaatggcttcaggcggtggcgcaccaatggcagacaataacgaaggcgccgacggagtgggtaatgcctcaggaaattggcactgcgattccacatggctgggcgacagagtcatcaccaccagcacccgcacctgggccttgcccacctacaataaccacctctacaagcaaatctccagtgcttcaacgggggccagcaacgacaaccactacttcggctacagcaccccctgggggtattttgatttcaacagattccactgccacttttcaccacgtgactggcagcgactcatcaacaacaattggggattccggcccaagagactcaacttcaaactcttcaacatccaagtcaaggaggtcacgacgaatgatggcgtcacaaccatcgctaataaccttaccagcacggttcaagtcttctcggactcggagtaccagcttccgtacgtcctcggctctgcgcaccagggccgcctccctccgttcccggcggacgtgttcatgattccgcaatacggctacctgacgctcaacaatggcagccaagccgtgggacgttcatcctcttactgcctggaatatttcccttctcagatgctgagaacgggcaacaactttaccttcagctacacctttgaggaagtgcctctccacagcagctgcgcgcacagccagagcctggaccggctgatgaatcctctcatcgaccaatacctgtattacctgaacagaactcaaaatcagtccggaagtgcccaaaacagggacttgctgttcagccgtgggtctccagctggcatgtctgttcagcccaaaaactggctacctggaccctgttatcggcagcagcgcgtttctaaaacaaaaacagacaacaacaacagcaattttacctggactggtgcttcaaaatataacctcaatgggcgtgaatccatcatcaaccctggcactgctatggcctcacacaaagacgacgaagacaagttctttcccatgagcggtgtcatgatttttggaaaagagagcgccggagcttcaaacactgcattggacaatgtcatgattacagacgaagaggaaattaaagccactaaccctgtggccaccgaaagatttgggaccgtggcagtcaatttccagagcagcagcacagaccctgcgaccggagatgtgcatgctatgggagcattacctggcatggtgtggcaagatagagacgtgtacctgcagggtcccatttgggccaaaattcctcacacagatggacactttcacccgtctcctcttatgggcggctttggactcaagaacccgcctcctcagatcctcatcaaaaacacgcctgttcctgcgaatcctccggcggagttttcagctacaaagtttgcttcattcatcacccaatactccgcaggacaagtgagtgtggaaattgaatgggagctgcagaaagaaaacagcaagcgctggaatcccgaagtgcagtacacatccaattatgcaaaatctgccaacgttgattttactgtggacaacaatggactttatactgagcctcgccccattggcacccgttaccttacccgtcccctgtaa

SEQ ID NO: 272 - protein, 736 aa, Adeno-associated virus
MAADGYLPDWLEDTLSEGIRQWWKLKPGPPPPKPAERHKDDSRGLVLPGYKYLGPFNGLDKGEPVNEADAAALEHDKAYDRQLDSGDNPYLKYNHADAEFQERLKEDTSFGGNLGRAVFQAKKRVLEPLGLVEEGAKTAPGKKRPVEQSPQEPDSPSGIGKTGQQPAKKRLNFGQTGDSESVPDPQPLGEPPATPAAVGPTTMASGGGAPMADNNEGADGVGNASGNWHCDSTWLGDRVITTSTRTWALPTYNNHLYKQISSASTGASNDNHYFGYSTPWGYFDFNRFHCHFSPRDWQRLINNNWGFRPKRLNFKLFNIQVKEVTTNDGVTTIANNLTSTVQVFSDSEYQLPYVLGSAHQGRLPPFPADVFMIPQYGYLTLNNGSQAVGRSSSYCLEYFPSQMLRTGNNFTFSYTFEEVPLHSSCAHSQSLDRLMNPLIDQYLYYLNRTQNQSGSAQNRDLLFSRGSPAGMSVQPKNWLPGPCYRQQRVSKTKTDNNNSNFTWTGASKYNLNGRESIINPGTAMASHKDDEDKFFPMSGVMIFGKESAGASNTALDNVMITDEEEIKATNPVATERFGTVAVNFQSSSTDPATGDVHAMGALPGMVWQDRDVYLQGPIWAKIPHTDGHFHPSPLMGGFGLKNPPPQILIKNTPVPANPPAEFSATKFASFITQYSAGQVSVEIEWELQKENSKRWNPEVQYTSNYAKSANVDFTVDNNGLYTEPRPIGTRYLTRPL

SEQ ID NO: 273 - protein, 736 aa, Adeno-associated virus
MAADGYLPDWLEDTLSEGIRQWWKLKPGPPPPKPAERHKDDSRGLVLPGYKYLGPFNGLDKGEPVNEADAAALEHDKAYDRQLDSGDNPYLKYNHADAEFQERLKEDTSFGGNLGRAVFQAKKRVLEPLGLVEEGAKTAPGKKRPVEQSPQEPDSSSGIGKTGQQPAKKRLNFGQTGDSESVPDPQPLGEPPATPAAVGPTTMASGGGAPMADNNEGADGVGNASGNWHCDSTWLGDRVITTSTRTWALPTYNNHLYKQISSASTGASNDNHYFGYSTPWGYFDFNRFHCHFSPRDWQRLINNNWGFRPKRLNFKLFNIQVKEVTTNDGVTTIANNLTSTVQVFSDSEYQLPYVLGSAHQGCLPPFPADVFMIPQYGYLTLNNGSQAVGRSSFYCLEYFPSQMLRTGNNFTFSYTFEEVPLHSSCAHSQSLDRLMNPLIDQYLYYLNRTQNQSGSAQNRDLLFSRGSPAGMSVQPKNWLPGPCYRQQRVSKTKTDNNNSNFTWTGASKYNLNGRESIINPGTAMASHKDDEDKFFPMSGVMIFGKESAGASNTALDNVMITDEEEIKATNPVATERFGTVAVNFQSSSTDPATGDVHAMGALPGMVWQDRDVYLQGPIWAKIPHTDGHFHPSPLMGGFGLKNPPPQILIKNTPVPANPPAEFSATKFASFITQYSTGQVSVEIEWELQKENSKRWNPEVQYTSNYAKSANVDFTVDNNGLYTEPRPIGTRYLTRPL

SEQ ID NO: 274 - DNA, 2208 bp, Adeno-associated virus
atggctgccgatggctatcttccagattggctcgaggacactctctctgaaggaataagacagtggtggaagctcaaacctggcccaccaccaccaaagcccgcagagcggcatagggacgacagcaggggtcttgtgcttcctgggtacaagtacctcggacccttcaacggactcgacaagggagagccggtcaacgaggcagacgccgcggccctcgagcacgacaaagcctacgaccggcagctcgacagcggagacaacccgtacctcaagtacaaccacgccgacgcggagtttcaggagcgccttaaagaagatacgtcttttgggggcaacctcggacgagcagtcttccaggcgaaaaagagggttcttgaacctctgggcctggttggggaacctgttaagacggctccgggaaaaaagaggccggtagagcactctcctgtggagccagactcctcctcgggaaccggaaaggcgggccagcagcctgcaagaaaaagattgaattttggtcagactggagacgcagactcagtacctgacccccagcctctcggacagccaccagcagccccctctggtctgggaactaatacgatggctacaggcagtggcgcaccaatggcagacaataacgagggcgccgacggagtgggtaattcctcgggaaattggcattgcgattccacatggatgggcgacagagtcatcaccaccagcacccgaacctgggccctgcccacctacaacaaccacctctacaaacaaatttccagccaatcaggagcctcgaacgacagtcactactttggctacagcaccccttgggggtattttgacttcaacagattccactgccacttttcaccacgtgactggcaaagactcatcaacaacaactggggattccgacccaagagactcaacttcaagctctttaacattcaagtcaaagaggtcacgcagaatgacggtacgacgacgattgccaataaccttaccagcacggttcaggtgtttactgactcggagtaccagctcccgtacgtcctcggctcggcgcatcaaggatgcctcccgccgttcccagcagacgtcttcatggtgccacagtatggatacctcaccctgaacaacgggagtcaggcagtaggacgctcttcattttactgcctggagtactttccttctcagatgctgcgtaccggaaacaactttaccttcagctacacttttgaggacgttcctttccacagcagctacgctcacagccagagtctggaccgtctcatgaatcctctcatcgaccagtacctgtattacttgagcacaacaaacactccaagtggaaccaccacgcagtcaaggctccagttttctcaggccggagcgagtgacattcgggaccagtctaggaactggcttcctggaccctgttaccgccagcagcgagtatcaaagacatctgcggataacaacaacagtgaatactcgtggactggagctaccaagtaccacctcaatggcagagactctctggtgaatccgggcccggccatggcaagccacaaggacaatgaagaaaagttttttcctcagagcggggttctcatctttgggaagcaaggctcagagaaaacaaatgtggacattgaaaaggtcatgattacagacgaagaggaaatcaggacaaccaatcccgtggctacggagcagtatggttctgtatctaccaacctccagagaggcaacagacaagcagctaccgcagatgtcaacacacaaggcgttcttccaggcatggtctggcaggacagagatgtgtaccttcaggggcccatctgggcaaagattccacacacggacggacattttcacccctctcccctcatgggtggattcggacttaaacaccctcctccacagattctcatcaagaacaccccggtacctgcgaatccttcgaccaccttcagtgcggcaaagtttgcttccttcatcacacagtactccacgggacaggtcagcgtggagatcgagtgggagctgcagaaggaaaacagcaaacgctggaatcccgaaattcagtacacttccaactacaacaagtctgttaatgtggactttactgtggacactaatggcgtgtattcagagcctcgccccattggcaccagatacctgactcgtaatctgtaa

SEQ ID NO: 275 - protein, 735 aa, Adeno-associated virus
MAADGYLPDWLEDTLSEGIRQWWKLKPGPPPPKPAERHRDDSRGLVLPGYKYLGPFNGLDKGEPVNEADAAALEHDKAYDRQLDSGDNPYLKYNHADAEFQERLKEDTSFGGNLGRAVFQAKKRVLEPLGLVGEPVKTAPGKKRPVEHSPVEPDSSSGTGKAGQQPARKRLNFGQTGDADSVPDPQPLGQPPAAPSGLGTNTMATGSGAPMADNNEGADGVGNSSGNWHCDSTWMGDRVITTSTRTWALPTYNNHLYKQISSQSGASNDSHYFGYSTPWGYFDFNRFHCHFSPRDWQRLINNNWGFRPKRLNFKLFNIQVKEVTQNDGTTTIANNLTSTVQVFTDSEYQLPYVLGSAHQGCLPPFPADVFMVPQYGYLTLNNGSQAVGRSSFYCLEYFPSQMLRTGNNFTFSYTFEDVPFHSSYAHSQSLDRLMNPLIDQYLYYLSTTNTPSGTTTQSRLQFSQAGASDIRDQSRNWLPGPCYRQQRVSKTSADNNNSEYSWTGATKYHLNGRDSLVNPGPAMASHKDNEEKFFPQSGVLIFGKQGSEKTNVDIEKVMITDEEEIRTTNPVATEQYGSVSTNLQRGNRQAATADVNTQGVLPGMVWQDRDVYLQGPIWAKIPHTDGHFHPSPLMGGFGLKHPPPQILIKNTPVPANPSTTFSAAKFASFITQYSTGQVSVEIEWELQKENSKRWNPEIQYTSNYNKSVNVDFTVDTNGVYSEPRPIGTRYLTRNL

SEQ ID NO: 276 - protein, 737 aa, Adeno-associated virus
RMAADGYLPDWLEDNLSEGIREWWDLKPGAPKPKANQQKQDDGRGLVLPGYKYLGPFNGLDKGEPVNAADAAALEHDKAYDQQLKAGDNPYLRYNHADAEFQERLQEDTSFGGNLGRAVFQAKKRVLEPLGLVEEGAKTAPGKKRPVEQSPQEPDSSSGIGKTGQQPAKKRLNFGQTGDSESVPDPQPLGEPPATPAAVGPTTMASGGGAPMADNNEGADGVGNASGNWHCDSTWLGDRVITTSTRTWALPTYNNHLYKQISSTSTGASNDNHYFGYGTPWGYFDFNRFHCHFSPRDWQRLINNNWGFRPKRLNFKLFNIQVEEVTTNDGVTTIANNLTSTVQVFSDSEYQLPYVLGSAHQGCLPPFPADVFMIPQYGYLTLNNGSQAVGRSSFYCLEYFPSQMLRTGNNFTFSYTFEEVPFHSSYAHSQSLDRLMNPLIDQYLYYLNRTQNQSGSAQNKDLLFSRGSPAGMSVQPKNWLPGPCYRQQRVSKTKTDNNNSNFTWTGASKYNLNGRESIINPGTAVASHKDDEDKFFPMSGVMIFGKESAGASSTALDNVMITDEEEIKATNPVATERFGTVAVNFQSSSTDPATGDVHAMGALPGMVWQDRDVYLQGPIWAKIPHTDGHFHPSPLMGGFGLKNPPPQILIKNTPVPANPPAEFSATKFASFITQYSTGQVSVEIEWELQKENSKRWNPEVQYTSNYAKSANVDFTVDNNGLYTEPRPIGTRYLTRPL

SEQ ID NO: 277 - protein, 736 aa, Adeno-associated virus
MAADGYLPDWLEDNLSEGIREWWDLKPGAPKPKANQQKQDDGRGLVLPGYKYLGPFNGLDKGEPVNAADAAALEHDKAYDQQLKAGDNPYLRYNHADAEFQERLQEDTSFGGNLGRAVFQAKKRVLEPLGLVEEGAKTAPGKKRPVEQSPQEPDSSSGIGKTGQQPAKKRLNFGQTGDSESVPDPQPLGEPPATPAAVGPTTMASGGGAPMADNNEGADGVGNASGNWHCDSTWLGDRVITTSTRTWALPTYNNHLYKQISSTSTGASNDNHYFGYGTPWGYFDFNRFHCHFSPRDWQRLINNNWGFRPKRLNFKLFNIQVEEVTTNDGVTTIANNLTSTVQVFSDSEYQLPYVLGSAHQGCLPPFPADVFMIPQYGYLTLNNGSQAVGRSSFYCLEYFPSQMLRTGNNFTFSYTFEEVPFHSSYAHSQSLDRLMNPLIDQYLYYLNRTQNQSGSAQNKDLLFSRGSPAGMSVQPKNWLPGPCYRQQRVSKTKTDNNNSNFTWTGASKYNLNGRESIINPGTAVASHKDDEDKFFPMSGVMIFGKESAGASSTALDNVMITDEEEIKATNPVATERFGTVAVNFQSSSTDPATGDVHAMGALPGMVWQDRDVYLQGPIWAKIPHTDGHFHPSPLMGGFGLKNPPPQILIKNTPVPANPPAEFSATKFASFITQYSTGQVSVEIEWELQKENSKRWNPEVQYTSNYAKSANVDFTVDNNGLYTEPRPIGTRYLTRPL

SEQ ID NO: 278 - DNA, 2211 bp, Adeno-associated virus
atggctgccgatggttatcttccagattggctcgaggacaacctctctgagggcattcgcgagtggtgggacttgaaacctggagccccgaagcccaaagccaaccagcaaaagcaggacgacggccggggtctggtgcttcctggctacaagtacctcggacccttcaacggactcgacaagggggagcccgtcaacgcggcggacgcagcggccctcgagcacgacaaggcctacgaccagcagctcaaagcgggtgacaatccgtacctgcggtataaccacgccgacgccgagtttcaggagcgtctgcaagaagatacgtcttttgggggcaacctcgggcgagcagtcttccaggccaagaagcgggttctcgaacctctcggtctggttgaggaaggcgctaagacggctcctggaaagaaacgtccggtagagcagtcgccacaagagccagactcctcctcgggcatcggcaagacaggccagcagcccgctaaaaagagactcaattttggccagactggcgactcagagtcagtccccgatccacaacctctcggagaacctccagcaacccccgctgctgtgggacctactacaatggcttcaggcggtggcgcaccaatggcagacaataacgaaggcgccgacggagtgggtaatgcctcaggaaattggcattgcgattccacatggctgggcgacagagtcatcaccaccagcacccgcacctgggccttgcccacctacaataaccacctctacaagcaaatctccagtacttcaacgggggccagcaacgacaaccactacttcggctacggcaccccctgggggtattttgatttcaacagattccactgccacttttcaccacgtgactggcagcgactcatcaacaacaattggggattccggcccaagagactcaacttcaaactcttcaacatccaagtcgaggaggtcacgacgaatgatggcgtcacaaccatcgctaataaccttaccagcacggttcaagtcttctcggactcggagtaccagcttccgtacgtcctcggctctgcgcaccagggctgcctccctccgttcccggcggacgtgttcatgattccgcaatacggctacctgacgctcaacaatggcagccaagccgtgggacgttcatccttttactgcctggaatatttcccttctcagatgctgagaacgggcaacaactttaccttcagctacacctttgaggaagtgcctttccacagcagctacgcgcacagccagagcctggaccggctgatgaatcctctcatcgaccaatacctgtattacctgaacagaacacaaaatcagtccggaagtgcccaaaacaaggacttgctgtttagccgtgggtctccagctggcatgtctgttcagcccaaaaactggctacctggaccctgttatcggcagcagcgcgtttctaaaacaaaaacagacaacaacaacagcaattttacctggactggtgcttcaaaatataacctcaatgggcgtgaatccatcatcaaccctggcaccgctgtggcctcacacaaagacgacgaagacaagttctttcccatgagcggtgtcatgatttttggaaaagagagcgccggagcttcaagcactgcattggacaatgtcatgattacagacgaagaggaaattaaagccactaaccctgtggccaccgaaagatttgggaccgtggcagtcaatttccagagcagcagcacagaccctgcgaccggagatgtgcatgctatgggagcattacctggcatggtgtggcaagatagagacgtgtacctgcagggtcccatttgggccaaaattcctcacacagatggacactttcacccgtctcctcttatgggcggctttggactcaagaacccgcctcctcagatcctcatcaaaaacacgcctgttcctgcgaatcctccggcggagttttcagctacaaagtttgcttcattcatcacccaatactccacaggacaagtgagtgtggaaattgaatgggagctgcagaaagaaaacagcaagcgctggaatcccgaagtgcagtacacatccaattatgcaaaatctgccaacgttgattttactgtggacaacaatggactttatactgagcctcgccccattggcacccgttaccttacccgtcccctgtaa

SEQ ID NO: 279 - protein, 737 aa, Adeno-associated virus
RMAADGYLPDWLEDNLSEGIREWWDLKPGAPKPKANQQKQDDGRGLVLPGYKYLGPFNGLDKGEPVNAADAAALEHDKAYDQQLKAGDNPYLRYNHADAEFQERLQEDTSFGGNLGRAVFQAKKRVLEPLGLVEEGAKTAPGKKRPVEQSPQEPDSSSGIGKTGQQPAKKRLNFGQTGDSESVPDPQPLGEPPATPAAVGPTTMASGGGAPMADNNEGADGVGNASGNWHCDSTWLGDRVITTSTRTWALPTYNNHLYKQISSTSTGASNDNHYFGYSTPWGYFDFNRFHCHFSPRDWQRLINNNWGFRPKRLNFKLFNIQVEEVTTNDGVTTIANNLTSTVQVFSDSEYQLPYVLGSAHQGCLPPFPADVFMIPQYGYLTLNNGSQAVGRSSFYCLEYFPSQMLRTGNNFTFSYTFEEVPFHSSYAHSQSLDRLMNPLIDQYLYYLNRTQNQSGSAQNKDLLFSRGSPAGMSVQPKNWLPGPCYRQQRVSKTKTDNNNSNFTWTGASKYNLNGRESIINPGTAVASHKDDEDKFFPMSGVMIFGKESAGASSTALDNVMITDEEEIKATNPVATERFGTVAVNFQSSSTDPATGDVHAMGALPGMVWQDRDVYLQGPIWAKIPHTDGHFHPSPLMGGFGLKNPPPQILIKNTPVPANPPAEFSATKFASFITQYSTGQVSVEIEWELQKENSKRWNPEVQYTSNYAKSANVDFTVDNNGLYTEPRPIGTRYLTRPL

SEQ ID NO: 280 - protein, 737 aa, Adeno-associated virus
RMAADGYLPDWLEDNLSEGIREWWDLKPGAPKPKANQQKQDDGRGLVLPGYKYLGPFNGLDKGEPVNAADAAALEHDKAYDQQLKAGDNPYLRYNHADAEFQERLQEDTSFGGNLGRAVFQAKKRVLEPLGLVEEGAKTAPGKKRPVEQSPQEPDSSSGIGKTGQQPAKKRLNFGQTGDSESVPDPQPLGEPPATPAAVGPTTMASGGGAPMADNNEGADGVGNASGNWHCDSTWLGDRVITTSTRTWALPTYNNHLYKQISSTSTGASNDNHYFGYSTPWGYFDFNRFHCHFSPRDWQRLINNNWGFRPKRLNFKLFNIQVKEVTTNDGVTTIANNLTSTVQVFSDSEYQLPYVLGSAHQGCLPPFPADVFMIPQYGYLTLNNGSQAVGRSSFYCLEYFPSQMLRTGNNFTFSYTFEEVPFHSSYAHSQSLDRLMNPLIDQYLYYLNRTQNQSGSAQNKDLLFSRGSPAGMSVQPKNWLPGPCYRQQRVSKTKTDNNNSNFTWTGASKYNLNGRESIINPGTAVASHKDDEDKFFPMSGVMIFGKESAGASSTALDNVMITDEEEIKATNPVATERFGTVAVNFQSSSTDPATGDVHAMGALPGMVWQDRDVYLQGPIWAKIPHTDGHFHPSPLMGGFGLKNPPPQILIKNTPVPANPPAEFSATKFASFITQYSTGQVSVEIEWELQKENSKRWNPEVQYTSNYAKSANVDFTVDNNGLYTEPRPIGTRYLTRPL

SEQ ID NO: 281 - protein, 737 aa, Adeno-associated virus
RMAADGYLPDWLEDNLSEGIREWWDLKPGAPKPKANQQKQDDGRGLVLPGYKYLGPFNGLDKGEPVNAADAAALEHDKAYDQQLKAGDNPYLRYNHADAEFQERLQEDTSFGGNLGRAVFQAKKRVLEPLGLVEEGAKTAPGKKRPVEQSPQEPDSSSGIGKTGQQPAKKRLNFGQTGDSESVPDPQPLGEPPATPAAVGPTTMASGGGAPMADNNEGADGVGNASGNWHCDSTWLGDRVITTSTRTWALPTYNNHLYKQISSTSTGASNDNHYFGYSTPWGYFDFNRFHCHFSPRDWQRLINNNWGFRPKRLNFKLFNIQVKEVTTNDGVTTIANNLTSTVQVFSDSEYQLPYVLGSAHQGCLPPFPADVFMIPQYGYLTLNNGSQAVGRSSFYCLEYFPSQMLRTGNNFTFSYTFEEVPFHSSYAHSQSLDRLMNPLIDQYLYYLNRTQNQSGSAQNKDLLFSRGSPAGMSVQPKNWLPGPCYRQQRVSKTKTDNNNSNFTWTGASKYNLNGRESIINPGTAVASHKDDEDKFFPMSGVMIFGKESAGANSTALDNVMITDEEEIKATNPVATERFGTVAVNFQSSSTDPATGDVHAMGALPGMVWQDRDVYLQGPIWAKIPHTDGHFHPSPLMGGFGLKNPPPQILIKNTPVPANPPAEFSATKFASFITQYSTGQVSVEIEWELQKENSKRWNPEVQYTSNYAKSANVDFTVDNNGLYTEPRPIGTRYLTRPL

SEQ ID NO: 282 - DNA, 2208 bp, Adeno-associated virus
atggctgccgatggttatcttccagattggctcaaggacactctctctgaaggaataagacagtggtggaagctcaaacctggcccaccaccaccaaagcccgcagagcggcataaggacgacagcgggggtcttgtgcttcctgggtacaagtacctcggacccttcaacggactcgacaagggagagccggtcaacgaggcagacgccgcggccctcgagtacgacaaggcctacgaccggcagctcgacagcggagacaacccgtacctcaagtacaaccacgccgacgcggagtttcaggagcgccttaaagaagatacgtcttttgggggcaacctcggacgagcagtcttccaggcgaaaaagagggttcttgaacctctgggcctggttgaggaacctgttaagacggctccgggaaaaaagaggccggtagagcactctcctgtggagccagactcctcctcgggaacaggaaaagcgggccagcagcctgcgagaaagagattgaattttggtcagactggagacgcagactccgtacctgacccccagcctctcggacagccaccagcagccccctctggtctgggaactaatacgatggctacaggcagtggcgcaccaatggcagacaataacgagggcgccgacggagtgggtaattcctcgggaagttggcattgcgattccacatggatgggcgacagagtcatcaccaccagcacccgaacctgggctctgcccacctacaacaaccatctgtacaagcagatctccagccaatcaggagccagcaacgacaaccactactttggctacagcaccccttgggggtattttgacttcaacagattccactgccacttttcaccacgtgactggcaaagactcatcaacaacaactggggattccggcccaagagactcaacttcaagctctttaacattcaagtcaaggaggtcacgcagaatgacggtacgacgacgattgccaataaccttaccagcacggttcaggtgtttactgactcggagtaccagctcccgtacgtccccggctcggcgcatcaaggatgcctcccgccgttcccagcagacgtcttcatggtgccacagtatggatacctcaccctgaacaacgggagtcaggcagtaggacgctcttcattttactgcctggagtactttccttctcagatgcttcgtaccggaaacaactttaccttcagctacacctttgaggatgttcctttccacagcagctacgctcacagccagagtttggaccgtctcatgaatcctctcatcgaccagtacctgtattacttgagcagaacaaacactccaagcggaaccaccacgcagtccaggcttcagttttctcaggccggagcaagtgacattcgggaccagtctaggaactggcttcctggaccctgttaccgccagcagcgagtatcaaagacagctgcggacaacaacaacagtgaatactcgtggactggagctaccaagtaccacctcaatggcagagactctctggtgaatccgggcccggccatggccagccacaaggacgatgaagaaaagttttttcctcaaagcggggttctcatctttgggaagcaaggctcagagaaaacaaatgtggacattgaaaaggtcatgattacagacgaagaggaaatcagaaccaccaatcccgtggccacggagcagtatggttctgtatctaccaacctccagagcggcaacacacaagcagctactgcagatgtcaacacacaaggcgttcttccaggcatggtctggcaggacagagacgtgcacctgcaggggcctatctgggcaaagattccacacacggacggacattttcacccctctcccctcatgggcggatttggacttaaacaccctcctccacagattctcatcaagaacaccccggtacctgcaaatccttcgaccaccttcagtgcggcaaagtttgcttccttcatcacacagtattccacagggcaggtcagcgtggagatcgagtgggagctgcagaaggagaacagcaaacgctggaaccccgagatccagtacacttccaactacaacaaatctgttaatgtggactttactgtggacactaatggtgtgtattcagagcctcgccccattggcaccagatacctgactcgtaatctgtaa

SEQ ID NO: 283 - protein, 735 aa, Adeno-associated virus
MAADGYLPDWLKDTLSEGIRQWWKLKPGPPPPKPAERHKDDSGGLVLPGYKYLGPFNGLDKGEPVNEADAAALEYDKAYDRQLDSGDNPYLKYNHADAEFQERLKEDTSFGGNLGRAVFQAKKRVLEPLGLVEEPVKTAPGKKRPVEHSPVEPDSSSGTGKAGQQPARKRLNFGQTGDADSVPDPQPLGQPPAAPSGLGTNTMATGSGAPMADNNEGADGVGNSSGSWHCDSTWMGDRVITTSTRTWALPTYNNHLYKQISSQSGASNDNHYFGYSTPWGYFDFNRFHCHFSPRDWQRLINNNWGFRPKRLNFKLFNIQVKEVTQNDGTTTIANNLTSTVQVFTDSEYQLPYVPGSAHQGCLPPFPADVFMVPQYGYLTLNNGSQAVGRSSFYCLEYFPSQMLRTGNNFTFSYTFEDVPFHSSYAHSQSLDRLMNPLIDQYLYYLSRTNTPSGTTTQSRLQFSQAGASDIRDQSRNWLPGPCYRQQRVSKTAADNNNSEYSWTGATKYHLNGRDSLVNPGPAMASHKDDEEKFFPQSGVLIFGKQGSEKTNVDIEKVMITDEEEIRTTNPVATEQYGSVSTNLQSGNTQAATADVNTQGVLPGMVWQDRDVHLQGPIWAKIPHTDGHFHPSPLMGGFGLKHPPPQILIKNTPVPANPSTTFSAAKFASFITQYSTGQVSVEIEWELQKENSKRWNPEIQYTSNYNKSVNVDFTVDTNGVYSEPRPIGTRYLTRNL

SEQ ID NO: 284 - DNA, 2208 bp, Adeno-associated virus
atggctgccgatggttatcttccagattggctcgaggacactctctctgaaggaataagacagtggtggaagctcaaacctggcccaccaccaccaaagcccgcagagcggcataaggacgacagcaggggtcttgtgcttcctgggtacaagtacctcggacccttcaacggactcgacaagggggagccggtcaacgaggcagacgccgcggccctcgagcacgacaaggcctacgaccggcagctcgacagcggagacaacccgtacctcaagtacaaccacgccgacgcagagtttcaggagcgccttaaagaagatacgtcttttgggggcaacctcggacgagcagtcttccaggcgaaaaagagggttcttgaacctctgggcctggttgaggaacctgttaagacggctccgggaaaaaagaggccggtagagcactctcctgtggagccagactcctcctcgggaaccggaaaagcgggccagcagcctgcaagaaaaagattaaattttggtcagactggagacgcagactccgtacctgacccccagcctctcggacagccaccagcagccccctctggtctgggatctactacaatggctacaggcagtggcgcaccaatggcagacaataacgagggtgccgatggagtgggtaattcctcaggaaattggcattgcgattcccaatggctgggcgacagagtcatcaccaccagcacccgaacctgggccctgcccacatacaacaaccacctctacaagcaaatctccagccaatcaggagccagcaacgacaaccactactttggctacagcaccccctgggggtattttgacttcaacagattccactgccacttttcaccacgtgactggcaaagactcatcaacaacaactggggattccggcccaaaagactcaacttcaagctctttaatattcaagtcaaagaggtcacgcagaatgacggtacgacgacgattgccaataaccttaccagcacggttcaggtgtttactgactcggagtaccagctcccgtacgtcctgggctcggcgcatcaaggatgcctcccgccgtttccagcggacgtcttcatggtcccacagtatggatacctcaccctgaacaacgggagtcaggcggtaggacgctcttccttttactgcctggagtactttccttctcagatgctgcgtactggaaacaactttcagttcagctacacttttgaagacgtgcctttccacagcagctacgctcacagccagagtctggatcggctgatgaatcctctgatcgaccagtacctgtattatctgaacaagacacaaacaaatagtggaactcttcagcagtctcggctactgtttagccaagctggaccaaccaacatgtctcttcaagctaaaaactggctgcctggaccttgctacagacagcagcgtctgtcaaaacaggcaaacgacaacaacaacagcaactttccctggactgcagctacaaagtatcatctaaatggccgggactcgttggttaatccaggaccagctatggccagtcgcaaggatgacgaagaaaagtttttccccatgcatggaaccctgatatttggtaaacaaggaacaaatgccaacgacgcggatttggaaaatgtcatgattacagatgaagaagaaatcagggccaccaatcccgtggctacggagcagtacgggactgtgtcaaataatttgcaaaactcaaacactggtccaactactggaactgtcaatcaccaaggagcgttacctggtatggtgtggcaggatcgagacgtgtacctgcagggacccatttgggccaagattcctcacaccgatggacactttcatccttctccactgatgggaggttttggactcaaacacccgcctcctcagatcatgatcaaaaacactcccgttccagccaatcctcccacaaacttcagttctgccaagtttgcttctttcatcacacagtattccacgggacaggtcagcgtggagatcgagtgggagctgcagaaggagaacagcaaacgctggaatcccgaaattcagtacacttccaactacaacaagtctgttaatgtggactttactgtggacactaatggtgtgtattcagagcctcgccccattggcaccagatacctgactcgtaatctgtaa

SEQ ID NO: 285 - protein, 735 aa, Adeno-associated virus
MAADGYLPDWLEDTLSEGIRQWWKLKPGPPPPKPAERHKDDSRGLVLPGYKYLGPFNGLDKGEPVNEADAAALEHDKAYDRQLDSGDNPYLKYNHADAEFQERLKEDTSFGGNLGRAVFQAKKRVLEPLGLVEEPVKTAPGKKRPVEHSPVEPDSSSGTGKAGQQPARKRLNFGQTGDADSVPDPQPLGQPPAAPSGLGSTTMATGSGAPMADNNEGADGVGNSSGNWHCDSQWLGDRVITTSTRTWALPTYNNHLYKQISSQSGASNDNHYFGYSTPWGYFDFNRFHCHFSPRDWQRLINNNWGFRPKRLNFKLFNIQVKEVTQNDGTTTIANNLTSTVQVFTDSEYQLPYVLGSAHQGCLPPFPADVFMVPQYGYLTLNNGSQAVGRSSFYCLEYFPSQMLRTGNNFQFSYTFEDVPFHSSYAHSQSLDRLMNPLIDQYLYYLNKTQTNSGTLQQSRLLFSQAGPTNMSLQAKNWLPGPCYRQQRLSKQANDNNNSNFPWTAATKYHLNGRDSLVNPGPAMASRKDDEEKFFPMHGTLIFGKQGTNANDADLENVMITDEEEIRATNPVATEQYGTVSNNLQNSNTGPTTGTVNHQGALPGMVWQDRDVYLQGPIWAKIPHTDGHFHPSPLMGGFGLKHPPPQIMIKNTPVPANPPTNFSSAKFASFITQYSTGQVSVEIEWELQKENSKRWNPEIQYTSNYNKSVNVDFTVDTNGVYSEPRPIGTRYLTRNL

SEQ ID NO: 286 - DNA, 2208 bp, Adeno-associated virus
atggctgccgatggttatcttccagattggctcgaggacactctctctgaaggaataagacagtggtggaagctcaaacctggcccaccaccaccaaagcccgcagagcggcataaggacgacagcaggggtcttgtgcttcctgggtacaagtacctcggacccttcaacggactcgacaagggagagccggtcaacgaggcagacgccgcggccctcgagcacgacaaagcctacgaccggcagctcgacagcggagacaacccgtacctcaagtacaaccacgccgacgcggagtttcaggagcgccttaaagaagatacgtcttttgggggcaacctcggacgagcagtcttccaggcgaaaaagagggttcttgaacctctgggcctggttggggaacctgtcaagacggctccaggaaaaaagaggccggtagagcactctcctgtggagccagactcctcctcgggaaccggaaaggcgggccagcagcctgcaagaaaaagattgaattttggtcagactggagacgcagactcagtacctgacccccagcctctcggacagccaccagcagccccctctggtctgggaactaatacgatggctacaggcagtggcgcaccaatggcagacaataacgagggcgccgacggagtgggtaattcctcgggaaattggcattgcgattccacatggatgggcgacagagtcatcaccaccagcacccgaacctgggccctgcccacctacaacaaccacctctacaaacaaatttccagccaatcaggagcctcgaacgacaatcactactttggctacagcaccccttgggggtattttgacttcaacagattccactgccacttttcaccacgtgactggcaaagactcatcaacaacaactggggattccgacccaagagactcaacttcaagctctttaacattcaagtcaaagaggtcacgcagaatgacggtacgacgacgattgccaataaccttaccagcacggttcaggtgtttactgactcggagtaccagctcccgtacgtcctcggctcggcgcatcaaggatgcctcccgccgttcccagcagacgtcttcatggtgccacagtatggatacctcaccctgaacaacgggagtcaggcagtaggacgctcttcattttactgcctggagtactttccttctcagatgctgcgtaccggaaacaactttaccttcagctacacttttgaggacgttcctttccacagcggctacgctcacagccagagtctggaccgtctcatgaatcctctcatcgaccagtacctgtattacttgagcacaacaaacactccaagtggaaccaccacgcagtcaaggcttcagttttctcaggccggagcgagtgacattcgggaccagtctaggaactggcttcctggaccctgttaccgccagcagcgagtatcaaagacatctgcggataacaacaacagtgaatactcgtggactggagctaccaagtaccacctcaatggcagagactctctggtgaatccgggcccggccatggcaagccacaaggacaatgaagaaaagttttttcctcagagcggggttctcatctttgggaagcaaggctcagagaaaacaaatgtggacattgaaaaggtcatgattacagacgaagaggaaatcaggacaaccaatcccgtggctacggagcagtacggttctgtatctaccaacctccagagaggcaacagacaagcagctaccgcagatgtcaacacacaaggcgttcttccaggcatggtctggcaggacagagatgtgtaccttcaggggcccatctgggcaaagattccacacacggacggacattttcacccctctcccctcatgggtggattcggacttaaacaccctcctccacagattctcatcaagaacaccccggtacctgcgaatccttcgaccaccttcagtgcggcaaagtttgcttccttcatcacacagtactccacgggacaggtcagcgtggagatcgagtgggagctgcagaaggaaaacagcaaacgctggaatcccgaaattcagtacacttccaactacaacaagtctgttaatgtggactttactgtggacactaatggcgtgtattcagagcctcgccccattggcaccagatacctgactcgtaatctgtaa

SEQ ID NO: 287 - protein, 735 aa, Adeno-associated virus
MAADGYLPDWLEDTLSEGIRQWWKLKPGPPPPKPAERHKDDSRGLVLPGYKYLGPFNGLDKGEPVNEADAAALEHDKAYDRQLDSGDNPYLKYNHADAEFQERLKEDTSFGGNLGRAVFQAKKRVLEPLGLVGEPVKTAPGKKRPVEHSPVEPDSSSGTGKAGQQPARKRLNFGQTGDADSVPDPQPLGQPPAAPSGLGTNTMATGSGAPMADNNEGADGVGNSSGNWHCDSTWMGDRVITTSTRTWALPTYNNHLYKQISSQSGASNDNHYFGYSTPWGYFDFNRFHCHFSPRDWQRLINNNWGFRPKRLNFKLFNIQVKEVTQNDGTTTIANNLTSTVQVFTDSEYQLPYVLGSAHQGCLPPFPADVFMVPQYGYLTLNNGSQAVGRSSFYCLEYFPSQMLRTGNNFTFSYTFEDVPFHSGYAHSQSLDRLMNPLIDQYLYYLSTTNTPSGTTTQSRLQFSQAGASDIRDQSRNWLPGPCYRQQRVSKTSADNNNSEYSWTGATKYHLNGRDSLVNPGPAMASHKDNEEKFFPQSGVLIFGKQGSEKTNVDIEKVMITDEEEIRTTNPVATEQYGSVSTNLQRGNRQAATADVNTQGVLPGMVWQDRDVYLQGPIWAKIPHTDGHFHPSPLMGGFGLKHPPPQILIKNTPVPANPSTTFSAAKFASFITQYSTGQVSVEIEWELQKENSKRWNPEIQYTSNYNKSVNVDFTVDTNGVYSEPRPIGTRYLTRNL

SEQ ID NO: 288 - DNA, 2208 bp, Adeno-associated virus
atggctgccgatggttatcttccagattggctcgaggacactctctctgaaggaataagacagtggtggaagctcaaacctggcccaccaccaccaaagcccgcagagcggcataaggacgacagcaggggtcttgtgcttcctgggtacaagtacctcggacccttcaacggactcgacaagggagagccggtcaacgaggcagacgccgcggccctcgagcacgacaaagcctacgaccggcagctcgacagcggagacaacccgtacctcaagtacaaccacgccgacgcggagtttcaggagcgccttaaagaagatacgtcttttgggggcaacctcggacgagcagtcttccaggcgaaaaagagggttcttgaacctctgggcctggttggggaacctgttaagacggctccgggaaaaaagaggccggtagagcactctcctgtggagccagactcctcctcgggaaccggaaaggcgggccagcagcctgcaagaaaaagattgaattttggtcagactggagacgcagactcagtacctgacccccagcctctcggacagccaccagcagccccctctggtctgggaactaatacgatggctacaggcagtggcgcaccaatggcagacaataacgagggcgccgacggagtgggtaattcctcgggaaatcggcattgcgattccacatggatgggcgacagagtcatcaccaccagcacccgaacctgggccctgcccacctacaacaaccacctctacagacaaatttccagccaatcaggagcctcgaacgacaatcactactttggctacagcaccccttgggggtattttgacttcaacagattccactgccacttttcaccacgtgactggcaaagactcatcaacaacaactggggattccgacccaagagactcaacttcaagctctttaacattcaagtcaaagaggtcacgcagaatgacggtacgacgacgattgccaataaccttaccagcacggttcaggtgtttactgactcggagtaccagctcccgtacgtcctcggctcggcgcatcaaggatgcctcccgccgttcccagcagacgtcttcatggtgccacagtatggatacctcaccctgagcaacgggagtcaggcagtaggacgctcttcattttactgcccggagtactttccttctcagatgctgcgtaccggaaacaactttaccttcagctacacttttgaggacgttcctttccacagcagctacgctcacagccagagtctggaccgtctcatgaatcctctcatcgaccagtacctgtattacttgagcacaacaaacactccaagtggaaccaccacgcagtcaaggcttcagttttctcaggccggagcgagtgacattcgggaccagtctaggaactggcttcctggaccctgttaccgccagcagcgagtatcaaagacatctgcggataacaacaacagtgaatactcgtggactggagctaccaagtaccacctcaatggcagagactctctggtgaatccgggcccggccatggcaagccacaaggacaatgaagaaaagttttttcctcagagcggggttctcatctttgggaagcaaggctcagagaaaacaaatgtggacattgaaaaggtcatgattacagacgaagaggaaatcaggacaaccaatcccgtggctacggagcagtatggttctgtatctaccaacctccagagaggcaacagacaagcagctaccgcagatgtcaacacacaaggcgttcttccaggcatggtctggcaggacagagatgtgtaccttcaggggcccatctgggcaaagattccacacacggacggacattttcacccctctcccctcatgggtggattcggacctaaacaccctcctccacagattctcatcaagaacaccccggtacctgcgaatccttcgaccaccttcagtgcggcaaagtttgcttccttcatcacacagtactccacgggacaggtcagcgtggagatcgagtgggagctgcagaaggaaaacagcaaacgctggaatcccgaaattcagtacacttccaactacaacaagtctgttaatgtggactttactgtggacactaatggcgtgtattcagagcctcgccccattggcaccagatacctgactcgtaatttgtaa

SEQ ID NO: 289 - protein, 735 aa, Adeno-associated virus
MAADGYLPDWLEDTLSEGIRQWWKLKPGPPPPKPAERHKDDSRGLVLPGYKYLGPFNGLDKGEPVNEADAAALEHDKAYDRQLDSGDNPYLKYNHADAEFQERLKEDTSFGGNLGRAVFQAKKRVLEPLGLVGEPVKTAPGKKRPVEHSPVEPDSSSGTGKAGQQPARKRLNFGQTGDADSVPDPQPLGQPPAAPSGLGTNTMATGSGAPMADNNEGADGVGNSSGNRHCDSTWMGDRVITTSTRTWALPTYNNHLYRQISSQSGASNDNHYFGYSTPWGYFDFNRFHCHFSPRDWQRLINNNWGFRPKRLNFKLFNIQVKEVTQNDGTTTIANNLTSTVQVFTDSEYQLPYVLGSAHQGCLPPFPADVFMVPQYGYLTLSNGSQAVGRSSFYCPEYFPSQMLRTGNNFTFSYTFEDVPFHSSYAHSQSLDRLMNPLIDQYLYYLSTTNTPSGTTTQSRLQFSQAGASDIRDQSRNWLPGPCYRQQRVSKTSADNNNSEYSWTGATKYHLNGRDSLVNPGPAMASHKDNEEKFFPQSGVLIFGKQGSEKTNVDIEKVMITDEEEIRTTNPVATEQYGSVSTNLQRGNRQAATADVNTQGVLPGMVWQDRDVYLQGPIWAKIPHTDGHFHPSPLMGGFGPKHPPPQILIKNTPVPANPSTTFSAAKFASFITQYSTGQVSVEIEWELQKENSKRWNPEIQYTSNYNKSVNVDFTVDTNGVYSEPRPIGTRYLTRNL

SEQ ID NO: 290 - DNA, 2205 bp, Adeno-associated virus
atggctgccgatggttatcttccagattggctcgaggacactctctctgaaggaataagacagtggtggaagctcaaacctggcccaccaccaccaaagcccgcagagcggcataaggacgacagcaggggtcttgtgcttcctgggtacaagtacctcggacccttcaacggactcgacaagggagagccggtcaacgaggcagacgccgcggccctcgagcacgacaaggcctacgaccggcagctcgacagcggagacaacccgtacctcaagtacaaccacgccgacgcggagtttcaggagcgtcttaaagaagatacgtcttttgggggcaacctcggacgagcagtcttccaggcgaaaaagagggttcttgaacctctgggcctggttgaggaacctgttaagacggctccgggaaaaaagaggccggtagagcactctcctgcggagccagactcctcctcgggaaccggaaaagcgggccagcagcctgcaagaaaaagactgaatttcggtcagactggagacgcagactccgtacctgacccccagcctctcagacagccaccagcagcccccacaagtttgggatctactacaatggctacaggcagtggcgcaccaatggcagacaataacgagggtgccgatggagtgggtaattcctcaggaaattggcattgcgattcccaatggctgggcgacagagtcatcaccaccagcacccgaacctgggccctgcccacctacaacaaccacctttacaagcaaatctccagccaatcaggagcctcaaacgacaaccactactttggctacagcaccccctgggggtattttgacttcaacagattccactgccacttttcaccacgtgactggcaaagactcatcaacaacaactggggattccgacccaagagactcaacttcaagctctttaacattcaagtcaaagaggtcacgcagaatgacggtacgacgacgattgccaataaccttaccagcacggttcaggtgtttactgactcggagtaccagctcccgtacgtcctcggctcggcgcatcaaggatgcctcccgccgtttccagcggacgtcttcatggtcccacagtatggatacctcaccctgaacaacgggagtcaggcggtaggacgctcttccttttactgcctggagtactttccttctcagatgctgcgtactggaaacaactttcagttcagctacacttttgaagacgtgcctttccacagcagctacgctcacagccagagtttggatcggctgatgaatcctctgatcgaccagtacctgtattatctaaacagaacacaaacagctagtggaactcagcagtctcggctactgtttagccaagctggacccacaagcatgtctcttcaagctaaaaactggctgcctggaccgtgttatcgccagcagcgtttgtcaaagcaggcaaacgacaacaacaacagcaactttccctggactggagctaccaagtactacctcaatggcagagactctttggtgaacccgggcccggccatggccagccacaaggacgatgaagaaaagtttttccccatgcatggaaccctaatatttggtaaagaaggaacaaatgctaccaacgcggaattggaaaatgtcatgattacagatgaagaggaaatcaggaccaccaatcccgtggctacagagcagtacggatatgtgtcaaataatttgcaaaactcaaatactgctgcaagtactgaaactgtgaatcaccaaggagcattacctggtatggtgtggcaggatcgagacgtgtacctgcagggacccatttgggccaagattcctcacaccgatggacactttcatccttctccactgatgggaggttttggactcaaacacccgcctcctcagattatgatcaaaaacactcccgttccagccaatcctcccacaaacttcagttctgccaagtttgcttccttcatcacacagtattccacgggacaggtcagcgtggagatcgagtgggagctgcagaaggagaacagcaaacgctggaatcccgaaattcagtacacttccaactacaacaaatctgttaatgtggactttactgtggacactaatggtgtgtattcagagcctcgccccattggcaccagatacctgactcgtaatctgtaa

SEQ ID NO: 291 - protein, 734 aa, Adeno-associated virus
MAADGYLPDWLEDTLSEGIRQWWKLKPGPPPPKPAERHKDDSRGLVLPGYKYLGPFNGLDKGEPVNEADAAALEHDKAYDRQLDSGDNPYLKYNHADAEFQERLKEDTSFGGNLGRAVFQAKKRVLEPLGLVEEPVKTAPGKKRPVEHSPAEPDSSSGTGKAGQQPARKRLNFGQTGDADSVPDPQPLRQPPAAPTSLGSTTMATGSGAPMADNNEGADGVGNSSGNWHCDSQWLGDRVITTSTRTWALPTYNNHLYKQISSQSGASNDNHYFGYSTPWGYFDFNRFHCHFSPRDWQRLINNNWGFRPKRLNFKLFNIQVKEVTQNDGTTTIANNLTSTVQVFTDSEYQLPYVLGSAHQGCLPPFPADVFMVPQYGYLTLNNGSQAVGRSSFYCLEYFPSQMLRTGNNFQFSYTFEDVPFHSSYAHSQSLDRLMNPLIDQYLYYLNRTQTASGTQQSRLLFSQAGPTSMSLQAKNWLPGPCYRQQRLSKQANDNNNSNFPWTGATKYYLNGRDSLVNPGPAMASHKDDEEKFFPMHGTLIFGKEGTNATNAELENVMITDEEEIRTTNPVATEQYGYVSNNLQNSNTAASTETVNHQGALPGMVWQDRDVYLQGPIWAKIPHTDGHFHPSPLMGGFGLKHPPPQIMIKNTPVPANPPTNFSSAKFASFITQYSTGQVSVEIEWELQKENSKRWNPEIQYTSNYNKSVNVDFTVDTNGVYSEPRPIGTRYLTRNL

SEQ ID NO: 292 - DNA, 3160 bp, Adeno-associated virus
acccttcactaaagggactagtcctgcaggtttaaacgaattcgcccttgctgcgtcaactggaccaatgagaactttcccttcaacgactgtgtcgacaagatggtgatttggtgggaggaggggaagatgaccgccaaggtcgtggagtcggccaaagccattctcggaggaagcaaggtgcgcgtggaccagaaatgcaagtcctcggcccagatagatccgactcccgtgatcgtcacctccaacaccaacatgtgcgccgtgattgacgggaactcaacgaccttcgaacaccagcagccgttgcaagaccggatgttcaaatttgaactcacccgccgtctggatcatgactttgggaaggtcaccaagcgggaagtcaaagactttttccggtgggcaaaggatcacgtggttgaggtggagcatgaattctacgtcaaaaagggtggagccaagaaaagacccgcccctagtgacgcagatataagtgagcccaaacgggtgcgcgagtcagttgcgcagccatcgacgtcagacgcggaagcttcgatcaactacgcggacaggtaccaaaacaaatgttctcgtcacgtgggcatgaatctgatgctgtttccctgcagacaatgcgagagaatgaatcaaaattcaaatatctgcttcactcacggacagaaagactgtttagagtgctttcccgtgtcagaatctcaacctgtttctgtcgtcaaaaaggcgtatcagaaactgtgctacattcatcatatcatgggaaaggtgccagacgcttgcactgcctgcgatctggtcaatgtggatttggatgactgcatctctgaacaataaatgatttaaatcaggtatggctgccgatggttatcttccagattggctcgaggacactctctctgaaggaataagacagtggtggaagctcaaacctggcccaccaccaccaaagcccgcagagcggcataaggacgacagcaggggtcttgtgcttcctgggtacaagtacctcggacccttcaacggactcgacaagggagagccggtcaacgaggcagacgccgcggccctcgagcacgacaaggcctacgaccggcagctcgacagcggagacaacccgtacctcaagtacaaccacgccgacgcggagtttcaggagcgtcttaaagaagatacgtcttttgggggcaacctcggacgagcagtcttccaggcgaaaaagagggttcttgaacctctgggcctggttgaggaacctgttaagacggctccgggaaaaaagaggccggtagagcactctcctgcggagccagactcctcctcgggaaccggaaaagcgggccagcagcctgcaagaaaaagactgaatttcggtcagactggagacgcagactccgtacctgacccccagcctctcagacagccaccagcagcccccacaagtttgggatctactacaatggctacaggcagtggcgcaccaatggcagacaataacgagggtgccgatggagtgggtaattcctcaggaaattggcattgcgattcccaatggctgggcgacagagtcatcaccaccagcacccgaacctgggccctgcccacctacaacaaccacctttacaagcaaatctccagccaatcaggagcctcaaacgacaaccactactttggctacagcaccccctgggggtattttgacttcaacagattccactgccacttttcaccacgtgactggcaaagactcatcaacaacaactggggattccgacccaagagactcaacttcaagctctttaacattcaagtcaaagaggtcacgcagaatgacggtacgacgacgattgccaataaccttaccagcacggttcaggtgtttactgactcggagtaccagctcccgtacgtcctcggctcggcgcatcaaggatgcctcccgccgtttccagcggacgtcttcatggtcccacagtatggatacctcaccctgaacaacgggagtcaggcggtaggacgctcttccttttactgcctggagtactttccttctcagatgctgcgtactggaaacaactttcagttcagctacacttttgaagacgtgcctttccacagcagctacgctcacagccagagtttggatcggctgatgaatcctctgatcgaccagtacctgtattatctaaacagaacacaaacagctagtggaactcagcagtctcggctactgtttagccaagctggacccacaagcatgtctcttcaagctaaaaactggctgcctggaccgtgttatcgccagcagcgtttgtcaaagcaggcaaacgacaacaacaacagcaactttccctggactggagctaccaagtactacctcaatggcagagactctttggtgaacccgggcccggccatggccagccacaaggacgatgaagaaaagtttttccccatgcatggaaccctaatatttggtaaagaaggaacaaatgctaccaacgcggaattggaaaatgtcatgattacagatgaagaggaaatcaggaccaccaatcccgtggctacagagcagtacggatatgtgtcaaataatttgcaaaactcaaatactgctgcaagtactgaaactgtgaatcaccaaggagcattacctggtatggtgtggcaggatcgagacgtgtacctgcagggacccatttgggccaagattcctcacaccgatggacactttcatccttctccactgatgggaggttttggactcaaacacccgcctcctcagattatgatcaaaaacactcccgttccagccaatcctcccacaaacttcagttctgccaagtttgcttccttcatcacacagtattccacgggacaggtcagcgtggagatcgagtgggagctgcagaaggagaacagcaaacgctggaatcccgaaattcagtacacttccaactacaacaaatctgttaatgtggactttactgtggacactaatggtgtgtattcagagcctcgccccattggcaccagatacctgactcgtaatctgtaattgcttgttaatcaataaaccgtttaattcgtttcagttgaactttggtctctgcgaagggcgaattcgcggccgctaaatcaatcg

SEQ ID NO: 293 - protein, 734 aa, Adeno-associated virus
MAADGYLPDWLEDTLSEGIRQWWKLKPGPPPPKPAERHKDDSRGLVLPGYKYLGPFNGLDKGEPVNEADAAALEHDKAYDRQLDSGDNPYLKYNHADAEFQERLKEDTSFGGNLGRAVFQAKKRVLEPLGLVEEPVKTAPGKKRPVEHSPAEPDSSSGTGKAGQQPARKRLNFGQTGDADSVPDPQPLGQPPAAPTSLGSTTMATGSGAPMADNNEGADGVGNSSGNWHCDSQWLGDRVITTSTRTWALPTYNNHLYKQISSQSGASNDNHYFGYSTPWGYFDFNRFHCRFSPRDWQRLINNNWGFRPKRLNFKLFNIQVKEVTQNDGTTTIANNLTSTVQVFTDSEYQLPYVLGSAHQGCLPPFPADVFMVPQYGYLTLNNGSQAVGRSSFYCLEYFPSQMLRTGNNFQFSYTFEDVPFHSSYAHSQGLDRLMNPLIDQYLYYLNRTQTASGTQQSRLLFSQAGPTSMSLQAKNWLPGPCYRQQRLSKQANDNNNSNFPWTGATKYHLNGGDSLVNPGPAMASHKDDEEKFFPMHGTLIFGKEGTNATNAELENVMITDEEEIRTTNPVATEQYGYVSNNLQNSNTAASTETVNHQGALPGMVWQDRDVYLRGPIWAKIPHADGHFHPSPLMGGFGLKHPPPQIMIKNTPVPANPPTNFSSAKFASFITQYSTGQVSVEIEWELQKENSKRWNPEIQYTSNYNKSVNVDFTVDTNGVYSEPRPIGTRYLTRNL

SEQ ID NO: 294 - DNA, 3157 bp, Adeno-associated virus
ctcactaagggactagtcctgcaggtttaaacgaattcgcccttgctgcgtcaactggaccaatgagaactttcccttcaacgactgtgtcgacaagatggtgatttggtgggaggaggggaagatgaccgccaaggtcgtggagtcggccaaagccactctcggaggaagcaaggtgcgcgtggaccagaaacgcaagtcctcggcccagatagatccgactcccgtgatcgtcacctccaacaccaacatgtgcgccgtgattgacgggaactcaacgaccttcgaacaccagcagccgttgcaagaccgaatgttcaaatttgaactcacccgccgtctggatcatgacttcgggaaggtcaccaagcaggaagtcaaagactttttccggtgggcaaaggatcacgtggttgaggtggagcatgaattctacgtcaaaaagggtggagccaagaaaagacccgcccctagtgacgcagatataagtgagcccaaacgggtgcgcgagtcagttgcgcagccatcgacgtcagacgcggaagcttcgatcaactacgcggacaggtaccaaaacaaatgttctcgtcacgtgggcatgaatctgatgctgtttccctgcagacaatgcgagagaatgaatcaaaattcaaatatctgcttcactcacggacagaaagactgtttagagtgctttcccgtgtcagaatctcaacctgtttctgtcgtcaaaaaggcgtatcagaaactgtgctacattcatcatatcatgggaaaggtgccagacgcttgcactgcctgcgatctggtcaatgtggatttggatgactgcatctctgaacaataaatgatttaaatcaggtatggctgccgatggttatcttccagattggctcgaggacactctctctgaaggaataagacagtggtggaagctcaaacctggcccaccaccaccaaagcccgcagagcggcataaggacgacagcaggggtcttgtgcttcctgggtacaagtacctcggacccttcaacggactcgacaagggagagccggtcaacgaggcagacgccgcggctctcgagcacgacaaggcctacgaccggcagctcgacagcggagacaacccgtacctcaagtacaaccacgccgacgcggagtttcaggagcgtcttaaagaagatacgtcttttgggggcaacctcggacgagcagtcttccaggcgaaaaagagggttcttgaacctctgggcctggttgaggaacctgttaagacggctccgggaaaaaagaggccggtagagcactctcctgcggagccagactcctcctcgggaaccggaaaagcgggccagcagcctgcaagaaaaagactgaatttcggtcagactggagacgcagactccgtacctgacccccagcctctcggacagccaccagcagcccccacaagtttgggatctactacaatggctacaggcagtggcgcaccaatggcagacaataacgagggtgccgatggagtgggtaattcctcaggaaattggcattgcgattcccaatggctgggcgacagagtcatcaccaccagcacccgaacctgggccctgcccacctacaacaaccacctttacaagcaaatctccagccaatcaggagcctcaaacgacaaccactactttggctacagcaccccctgggggtattttgacttcaacagattccactgccgcttttcaccacgtgactggcaaagactcatcaacaacaactggggattccgacccaagagactcaacttcaagctctttaacattcaagtcaaagaggtcacgcagaatgacggtacgacgacgattgccaataaccttaccagcacggttcaggtgtttactgactcggagtaccagctcccgtacgtcctcggctcggcgcatcaaggatgcctcccgccgtttccagcggacgtcttcatggtcccacagtatggatacctcaccctgaacaacgggagtcaggcggtaggacgctcttccttttactgcctggagtactttccttctcagatgctgcgtactggaaacaactttcagttcagctacacttttgaagacgtgcctttccacagcagctacgctcacagccagggtttggatcggctgatgaatcctctgatcgaccagtacctgtattatctaaacagaacacaaacagctagtggaactcagcagtctcggctactgtttagccaagctggacccacaagcatgtctcttcaagctaaaaactggctgcctggaccgtgttatcgccagcagcgtttgtcaaagcaggcaaacgacaacaacaacagcaactttccctggactggagctaccaagtaccacctcaatggcggagactctttggtgaacccgggcccggccatggccagccacaaggacgatgaagaaaagtttttccccatgcatggaaccctaatatttggtaaagaaggaacaaatgctaccaacgcggaattggaaaatgtcatgattacagatgaagaggaaatcaggaccaccaatcccgtggctacagagcagtacggatatgtgtcaaataatttgcaaaactcaaatactgctgcaagtactgaaactgtgaatcaccaaggagcattacctggtatggtgtggcaggatcgagacgtgtacctgcggggacccatttgggccaagattcctcacgccgatggacactttcatccttctccactgatgggaggttttggactcaaacacccgcctcctcagattatgatcaaaaacactcccgttccagccaatcctcccacaaacttcagttctgccaagtttgcttccttcatcacacagtattccacgggacaggtcagcgtggagatcgagtgggagctgcagaaggagaacagcaaacgctggaatcccgaaattcagtacacttccaactacaacaaatctgttaatgtggactttactgtggacactaatggtgtgtattcagagcctcgccccattggcaccagatacctgactcgtaatctgtaattgcttgttaatcaataaaccgtttaattcgtttcagttgaactttggtctctgcgaagggcgaattcgcggccgctaaattcaattcg

SEQ ID NO: 295 - protein, 734 aa, Adeno-associated virus
MAADGYLPDWLEDTLSEGIRQWWKLKPGPPPPKPAERHKDDSRGLVLPGYKYLGPFNGLDKGEPVNEADAAALEHDKAYDRQLDSGDNPYLKYNHADAEFQERLKEDTSFGGNLGRAVFQAKKRVLEPLGLVEEPVKTAPGKKRPVEHSPAEPDSSSGTGKAGQQPARKRLNFGQTGDADSVPDPQPLGQPPAAPTSLGSTTMATGSGAPMADNNEGADGVGNSSGNWHCDSQWLGDRVITTSTRTWALPTYNNHLYKQISSQSGASNDNHYFGYSTPWGYFDFNRFHCHFSPRDWQRLINNNWGFRPKRLNFKLFNIQVKEVTQNDGTTTIANNLTSTVQVFTDSEYQLPYVLGSAHQGCLPPFPADVFMVPQYGYLTLNNGSQAVGRSSFYCLECFPSQMLRTGNNFQFSYTFEDVPFHSSYAHSQSLDRLMNPLIDQYLYYLNRTQTASGTQQSRLLFSQAGPTSMSLQAKNWLPGPCYRQQRLSKQANDNNNSNFPWTGATKYHLNGRDSLVNPGPAMASHKDDEEKFFPMHGTLIFGKEGTNATNAELENVMITDEEEIRTTNPVATEQYGYVSNNLQNSNTAASTETVNHQGALPGMVWQDRDVYLQGPIWAKIPHTDGHFHPSPLMGGFGLKHPPPQIMIKNTPVPANPPTNFSSAKFASFITQYSTGQVSVEIEWELQKENSKRWNPEIQYTSNYNKSVNVDFTVDTNGVYSEPRPIGTRYLTRNL

SEQ ID NO: 296 - DNA, 2208 bp, Adeno-associated virus
atggctgccgatggttatcttccagattggctcgaggacactctctctgaaggaataagacagtggtggaagctcaaacctggcccaccaccaccaaagcccgcagagcggcataaggacgacagcaggggtcttgtgcttcctggatacaagtacctcggacccttcaacggactcgacaagggagagccggtcaacgaggcagacgccgcggccctcgagcacgacaaggcctacgaccggcagctcgacagcggagacaacccgtacctcaagtacaaccacgccgacgcggagtttcaggagcgccttaaagaagatacgtcttttgggggcaacctcggacgagcagtcttccaggcgaaaaagagggttcttgaacctctgggcctggttgaggaacctgttaagacggctccgggaaaaaagaggccggtagagcactctcctgtggagccagactcctcctcgggaaccggaaaagcgggcaaccagcctgcaagaaaaagattgaatttcggtcagactggagacgcagactccgtacctgacccccagcctctcggacagccaccagcatccccctctggtctgggaactaatacgatggctacaggcagtggcgcaccaatggcagacaataacgagggcgccgacggagtgggtaattcctcgggaaattggcattgcgattccacatggatgggcgacagagtcgtcaccaccagcacccgcacctgggccctgcccacctacaacaaccacctctacaagcagatttccagccaatcaggagccagcaacgacaaccactactttggctacagcaccccttgggggtattttgacttcaacagattccactgccacttttcgccacgcgactggcagagactcatcaacaacaactggggattccggcccaaaagactcaacttcaagctgtttaacattcaagtcaaggaggtcacgcagaatgacggtacgacgacgattgccaataaccttaccagcacggttcaggtgtttactgacttggagtaccagctcccgtacgtcctcggctcggcgcatcaaggatgcctcccgccgttcccagcagacgtcttcatggtgccacagtatggatacctcaccctgaacaacgggagtcaggcggtaggacgctcttccttttactgcctggagtactttccttctcagatgcttcgcaccggaaacaactttaccttcagctacacttttgaagacgttcctttccacagcagctacgctcacagtcaaagtctggaccgtctcatgaatcctctcatcgaccagtacctgtattacttgagcagaacaaacactccaagcggaaccactacgcagtccaggcttcagttttctcaggccggagcgagtgacattcgggaccagtctaggaactggcttcctggaccctgttaccgccagcagcgagtatcaaagacagctgcggataacaacaacagtgaatactcgtggactggagctaccaagtaccacctcaatggcagagactctctggtgaatccgggcccggccatggccagccacaaggacgatgaagaaaagttttttcctcaaagcggggttctcatctttgggaagcaaggctcagagaaaacaaatgtggacattgaaaaggtcatgattacagacgaagaggaaatcaggaccaccaatcccgtggctacggagcagtatggttctgtatctaccaacctccagagcggcaacacacaagcagctacctcagatgtcaacacacaaggcgttcttccaggcatggtctggcaggacagagacgtgtacctgcaggggcccatctgggcaaaaattccacacacggacggacattttcacccctctcccctcatgggcggatttggacttaaacaccctcctccacagattctcattaagaataccccggtacctgcgaatccttcgaccaccttcagcgcggcaaagtttgcttccttcatcacacagtattccacggggcaggtcagcgtggagatcgagtgggagctgcagaaggagaacagcaaacgctggaatcccgaaattcagtacacttccaactacaacaaatctgttaatgtggactttactgtggacactaatggggtgtattcagagcctcgccctattggcaccagatacctgactcgtaatctgtaa

SEQ ID NO: 297 - DNA, 3159 bp, Adeno-associated virus
gattgatttagcggccgcgaattcgcccttgctgcgtcaactggaccaatgagaactttcccttcaacgattgcgtcgacaagatggtgatctggtgggaggagggaaagatgaccgccaaggtcgtggagtcggccaaagccattctcggaggaagcaaggtgcgtgtggaccaaaagtgcaagtcttcggcccagatcgacccgactcccgtgatcgtcacctccaacaccaacatgtgcgccgtgattgatggaaactcaacgaccttcgagcaccagcagccgttgcaagaccggatgttcaaatttgaacttacccgccgtctggatcatgactttggaaaggtcaccaagcaggaagtgaaagactttttccggtgggcaaaggatcacgtggttgaggtggagcatgagttctacgtcaaaaagggtggagccaaaaaaagacccgcccccagtgacgcagatataagtgagcccaaacgggcgcgcgagtcagttgcgcagccatcgacgtcagacgcggaagcttcgatcaactacgcggacaggtaccaaaacaaatgttctcgtcacgtgggcatgaatctgatgctgtttccctgcagacaatgcgagagaatgaatcagaattcaaatatctgcttcactcacggacagaaagactgtccatagtgctttcccgtgtcagaatctcaacccgtttctgtcgtcaaaaaggcgtatcagaaactgtgctacattcatcacatcatgggaaaggtgccagacgcttgcactgcttgcgacctggtcaatgtggatttggatgactgcatctctgaacaataaatgatttaaatcaggtatggctgccgatggttatcttccagattggctcgaggacactctctctgaaggaataagacagtggtggaagctcaaacctggcccaccaccaccaaagcccgcagagcggcataaggacgacagcaggggtcttgtgcttcctggatacaagtacctcggacccttcaacggactcgacaagggagagccggtcaacgaggcagacgccgcggccctcgagcacgacaaggcctacgaccggcagctcgacagcggagacaacccgtacctcaagtacaaccacgccgacgcggagtttcaggagcgccttaaagaagatacgtcttttgggggcaacctcggacgagcagtcttccaggcgaaaaagagggttcttgaacctctgggcctggttgaggaacctgttaagacggctccgggaaaaaagaggccggtagagcactctcctgtggagccagactcctcctcgggaaccggaaaagcgggcaaccagcctgcaagaaaaagattgaatttcggtcagactggagacgcagactccgtacctgacccccagcctctcggacagccaccagcatccccctctggtctgggaactaatacgatggctacaggcagtggcgcaccaatggcagacaataacgagggcgccgacggagtgggtaattcctcgggaaattggcattgcgattccacatggatgggcgacagagtcgtcaccaccagcacccgcacctgggccctgcccacctacaacaaccacctctacaagcagatttccagccaatcaggagccagcaacgacaaccactactttggctacagcaccccttgggggtattttgacttcaacagattccactgccacttttcgccacgcgactggcagagactcatcaacaacaactggggattccggcccaaaagactcaacttcaagctgtttaacattcaagtcaaggaggtcacgcagaatgacggtacgacgacgattgccaataaccttaccagcacggttcaggtgtttactgacttggagtaccagctcccgtacgtcctcggctcggcgcatcaaggatgcctcccgccgttcccagcagacgtcttcatggtgccacagtatggatacctcaccctgaacaacgggagtcaggcggtaggacgctcttccttttactgcctggagtactttccttctcagatgcttcgcaccggaaacaactttaccttcagctacacttttgaagacgttcctttccacagcagctacgctcacagtcaaagtctggaccgtctcatgaatcctctcatcgaccagtacctgtattacttgagcagaacaaacactccaagcggaaccactacgcagtccaggcttcagttttctcaggccggagcgagtgacattcgggaccagtctaggaactggcttcctggaccctgttaccgccagcagcgagtatcaaagacagctgcggataacaacaacagtgaatactcgtggactggagctaccaagtaccacctcaatggcagagactctctggtgaatccgggcccggccatggccagccacaaggacgatgaagaaaagttttttcctcaaagcggggttctcatctttgggaagcaaggctcagagaaaacaaatgtggacattgaaaaggtcatgattacagacgaagaggaaatcaggaccaccaatcccgtggctacggagcagtatggttctgtatctaccaacctccagagcggcaacacacaagcagctacctcagatgtcaacacacaaggcgttcttccaggcatggtctggcaggacagagacgtgtacctgcaggggcccatctgggcaaaaattccacacacggacggacattttcacccctctcccctcatgggcggatttggacttaaacaccctcctccacagattctcattaagaataccccggtacctgcgaatccttcgaccaccttcagcgcggcaaagtttgcttccttcatcacacagtattccacggggcaggtcagcgtggagatcgagtgggagctgcagaaggagaacagcaaacgctggaatcccgaaattcagtacacttccaactacaacaaatctgttaatgtggactttactgtggacactaatggggtgtattcagagcctcgccctattggcaccagatacctgactcgtaatctgtaattgcttgttaatcaataaaccgtttaattcgtttcagttgaactttggtctctgcgaagggcgaattcgtttaaacctgcaggactagtccctttagtgagg

SEQ ID NO: 298 - protein, 735 aa, Adeno-associated virus
MAADGYLPDWLEDTLSEGIRQWWKLKPGPPPPKPAERHKDDSRGLVLPGYKYLGPFNGLDKGEPVNEADAAALEHDKAYDRQLDSGDNPYLKYNHADAEFQERLKEDTSFGGNLGRAVFQAKKRVLEPLGLVEEPVKTAPGKKRPVEHSPVEPDSSSGTGKAGNQPARKRLNFGQTGDADSVPDPQPLGQPPASPSGLGTNTMATGSGAPMADNNEGADGVGNSSGNWHCDSTWMGDRVVTTSTRTWALPTYNNHLYKQISSQSGASNDNHYFGYSTPWGYFDFNRFHCHFSPRDWQRLINNNWGFRPKRLNFKLFNIQVKEVTQNDGTTTIANNLTSTVQVFTDLEYQLPYVLGSAHQGCLPPFPADVFMVPQYGYLTLNNGSQAVGRSSFYCLEYFPSQMLRTGNNFTFSYTFEDVPFHSSYAHSQSLDRLMNPLIDQYLYYLSRTNTPSGTTTQSRLQFSQAGASDIRDQSRNWLPGPCYRQQRVSKTAADNNNSEYSWTGATKYHLNGRDSLVNPGPAMASHKDDEEKFFPQSGVLIFGKQGSEKTNVDIEKVMITDEEEIRTTNPVATEQYGSVSTNLQSGNTQAATSDVNTQGVLPGMVWQDRDVYLQGPIWAKIPHTDGHFHPSPLMGGFGLKHPPPQILIKNTPVPANPSTTFSAAKFASFITQYSTGQVSVEIEWELQKENSKRWNPEIQYTSNYNKSVNVDFTVDTNGVYSEPRPIGTRYLTRNL

SEQ ID NO: 299 - DNA, 2205 bp, Adeno-associated virus
atggctgccgatggttatcttccagattggctcgaggacactctctctgaaggaataagacagtggtggaagctcaaacctggcccaccaccaaagcccgcagagcggcataaggacgacagcaggggtcttgtgcttcctggatacaagtacctcggacccttcaacggactcgacaagggagagccggtcaacgaggcagacgccgcggccctcgagcacgacaaggcctacgaccggcagctcgacagcggagacaacccgtacctcaagtacaaccacgccgacgcggagtttcaggagcgccttaaagaagatacgtcttttgggggcaacctcggacgagcagtcttccaggcgaaaaagagggttcttgaacctctgggcctggttgaggaacctgttaagacggctccgggaaaaaagaggcccgtagagcactctcctgtggagccagactcctcctcgggaaccggaaaagcgggcaaccagcctgcaagaaaaagattgaatttcggtcagactggagacgcagactccgtacctgacccccagcctctcggacagccaccagcagccccctctggtctgggaactaatacgatggctacaggcagtggcgcaccaatggcagacaataacgagggcgccgacggagtgggtaattcctcgggagattggcattgcgattccacatggatgggcgacagagtcatcaccaccagcacccgcacctgggccctgcccacctacaacaaccacctctacaagcagatttccagccaatcaggagccagcaatgacaaccactactttggctacagcaccccttgggggtattttgacttcaacagattccactgccacttttcgccacgcgactggcagagactcatcaacaacaactggggattccggcccaaaagactcaacctcaagctgtttaacattcaagtcaaggaggtcacgcagaatgacggtacgacgacgattgccaataaccttaccagcacggttcaggtgtttactgacttggagtaccagctcccgtacgtcctcggctcggcgcatcaaggatgcctcccgccgttcccagcagacgtcttcatggtgccacagtatggatacctcaccctgaacaacgggagtcaggcggtaggacgctcttccttttactgcctggagtactttccttctcagatgcttcgtaccggaaacaactttaccttcagctacacttttgaagacgttcctttccacagcagctacgctcacagtcaaagtctggaccgtctcatgaatcctctcatcgaccagtacctgtattacttgagcagaacaaacactccaagcggaaccactacgcagtccaggcttcagttttctcaggccggagcgagtgacattcgggaccagtctaggaactggcttcctggaccctgttaccgccagcagcgagtatcaaagacagctgcggataacaacaacggtgaatactcgtggactggagctaccaagtaccacctcaatggcagagactctctggtgaatccgggcccggccatggccagccacaaggacgatgaagaaaagttttttcctcaaagcggggttctcatctttgggaagcaaggctcagagaaaacaaatgtggacattgaaaaggtcatgattacagacgaagaggaaatcaggaccaccaatcccgtggctacggagcagtatggttctgtatctaccaacctccagagcggcaacacacgagcagctacctcagatgtcaacacacaaggcgttcttccaggcatggtctggcaggacagagacgtgtacctgcaggggcccatctgggcaaaaattccacacacggacggacattttcacccctctcccctcatgggcggatttggacttaaacaccctcctccacagattctcattaagaataccccggtacctgcgaatccttcgaccaccttcagcgcggcaaagtttgcttccttcatcacacagtattccacggggcaggtcagcgtggagatcgagtgggagctgcagaaggagaacagcaaacgctggaatcccgaaattcagtacacttccaactacaacaaatctgttaatgtggactttactgtggacactaatggggtgtattcagagcctcgccctattggcaccagatacctgactcgtaatctgtaa

SEQ ID NO: 300 - DNA, 3156 bp, Adeno-associated virus
cgattgaatttagcggccgcgaattcgcccttgctgcgtcaacggaccaatgagaactttcccttcaacgattgcgtcgacaagatggtgatctggtgggaggagggaaagatgaccgccaaggtcgtggagtcggccaaagccattctcggaggaagcaaggtgcgtgtggaccaaaagtgcaagtcttcggcccagatcgacccgactcccgtgatcgtcacctccaacaccaacatgtgcgccgtgattgatggaaactcaacgaccttcgagcaccagcagccgttgcaagaccggatgttcaaatttgaacttacccgccgtctggatcatgactttggaaaggtcaccaagcaggaagtgaaagactttttccggtgggcaaaggatcacgtggttgaggtggagcatgagttctacgtcaaaaagggtggagccaaaaaaagacccgcccccagtgacgcagatataagtgagcccaaacgggcgcgcgagtcagttgcgcagccatcgacgtcagacgcggaagcttcgatcaactacgcggacaggtaccaaaacaaatgttctcgtcacgtgggcatgaatctgatgctgtttccctgcagacaatgcgagcgaatgaatcagaattcaaatatctgcttcactcacggacagaaagactgtttagagtgctttcccgtgtcagaatctcaacccgtttctgtcgtcaaaaaggcgtatcagaaactgtgctacattcatcacatcatgggaaaggtgccagacgcttgcactgcttgcgacctggtcaatgtggatttggatgactgcatctctgaacaataaatgatttaaatcaggtatggctgccgatggttatcttccagattggctcgaggacactctctctgaaggaataagacagtggtggaagctcaaacctggcccaccaccaaagcccgcagagcggcataaggacgacagcaggggtcttgtgcttcctggatacaagtacctcggacccttcaacggactcgacaagggagagccggtcaacgaggcagacgccgcggccctcgagcacgacaaggcctacgaccggcagctcgacagcggagacaacccgtacctcaagtacaaccacgccgacgcggagtttcaggagcgccttaaagaagatacgtcttttgggggcaacctcggacgagcagtcttccaggcgaaaaagagggttcttgaacctctgggcctggttgaggaacctgttaagacggctccgggaaaaaagaggcccgtagagcactctcctgtggagccagactcctcctcgggaaccggaaaagcgggcaaccagcctgcaagaaaaagattgaatttcggtcagactggagacgcagactccgtacctgacccccagcctctcggacagccaccagcagccccctctggtctgggaactaatacgatggctacaggcagtggcgcaccaatggcagacaataacgagggcgccgacggagtgggtaattcctcgggagattggcattgcgattccacatggatgggcgacagagtcatcaccaccagcacccgcacctgggccctgcccacctacaacaaccacctctacaagcagatttccagccaatcaggagccagcaatgacaaccactactttggctacagcaccccttgggggtattttgacttcaacagattccactgccacttttcgccacgcgactggcagagactcatcaacaacaactggggattccggcccaaaagactcaacctcaagctgtttaacattcaagtcaaggaggtcacgcagaatgacggtacgacgacgattgccaataaccttaccagcacggttcaggtgtttactgacttggagtaccagctcccgtacgtcctcggctcggcgcatcaaggatgcctcccgccgttcccagcagacgtcttcatggtgccacagtatggatacctcaccctgaacaacgggagtcaggcggtaggacgctcttccttttactgcctggagtactttccttctcagatgcttcgtaccggaaacaactttaccttcagctacacttttgaagacgttcctttccacagcagctacgctcacagtcaaagtctggaccgtctcatgaatcctctcatcgaccagtacctgtattacttgagcagaacaaacactccaagcggaaccactacgcagtccaggcttcagttttctcaggccggagcgagtgacattcgggaccagtctaggaactggcttcctggaccctgttaccgccagcagcgagtatcaaagacagctgcggataacaacaacggtgaatactcgtggactggagctaccaagtaccacctcaatggcagagactctctggtgaatccgggcccggccatggccagccacaaggacgatgaagaaaagttttttcctcaaagcggggttctcatctttgggaagcaaggctcagagaaaacaaatgtggacattgaaaaggtcatgattacagacgaagaggaaatcaggaccaccaatcccgtggctacggagcagtatggttctgtatctaccaacctccagagcggcaacacacgagcagctacctcagatgtcaacacacaaggcgttcttccaggcatggtctggcaggacagagacgtgtacctgcaggggcccatctgggcaaaaattccacacacggacggacattttcacccctctcccctcatgggcggatttggacttaaacaccctcctccacagattctcattaagaataccccggtacctgcgaatccttcgaccaccttcagcgcggcaaagtttgcttccttcatcacacagtattccacggggcaggtcagcgtggagatcgagtgggagctgcagaaggagaacagcaaacgctggaatcccgaaattcagtacacttccaactacaacaaatctgttaatgtggactttactgtggacactaatggggtgtattcagagcctcgccctattggcaccagatacctgactcgtaatctgtaattgcttgttaatcaataaaccgtttaattcgtttcagttgaactttggtctctgcgaagggcgaattcgtttaaacctgcaggactagtccctttagtgag

SEQ ID NO: 301 - protein, 734 aa, Adeno-associated virus
MAADGYLPDWLEDTLSEGIRQWWKLKPGPPPKPAERHKDDSRGLVLPGYKYLGPFNGLDKGEPVNEADAAALEHDKAYDRQLDSGDNPYLKYNHADAEFQERLKEDTSFGGNLGRAVFQAKKRVLEPLGLVEEPVKTAPGKKRPVEHSPVEPDSSSGTGKAGNQPARKRLNFGQTGDADSVPDPQPLGQPPAAPSGLGTNTMATGSGAPMADNNEGADGVGNSSGDWHCDSTWMGDRVITTSTRTWALPTYNNHLYKQISSQSGASNDNHYFGYSTPWGYFDFNRFHCHFSPRDWQRLINNNWGFRPKRLNLKLFNIQVKEVTQNDGTTTIANNLTSTVQVFTDLEYQLPYVLGSAHQGCLPPFPADVFMVPQYGYLTLNNGSQAVGRSSFYCLEYFPSQMLRTGNNFTFSYTFEDVPFHSSYAHSQSLDRLMNPLIDQYLYYLSRTNTPSGTTTQSRLQFSQAGASDIRDQSRNWLPGPCYRQQRVSKTAADNNNGEYSWTGATKYHLNGRDSLVNPGPAMASHKDDEEKFFPQSGVLIFGKQGSEKTNVDIEKVMITDEEEIRTTNPVATEQYGSVSTNLQSGNTRAATSDVNTQGVLPGMVWQDRDVYLQGPIWAKIPHTDGHFHPSPLMGGFGLKHPPPQILIKNTPVPANPSTTFSAAKFASFITQYSTGQVSVEIEWELQKENSKRWNPEIQYTSNYNKSVNVDFTVDTNGVYSEPRPIGTRYLTRNL

SEQ ID NO: 302 - DNA, 2208 bp, Adeno-associated virus
atggctgccgatggttatcttccagattggctcgaggacactctctctgaaggaataagacagtggtggaagctcaaacctggcccaccaccaccaaagcccgcagagcggcataaggacgacagcaggggtcttgtgcttcctgggtacaagtacctcggacccttcaacggactcgacaagggagagccggtcaacgaggcagacgccgcggccctcgagcacgacaaggcctacgaccggcagctcgacagcggagacaacccgtacctcaagtacgaccacgccgacgcggagtttcaggagcgccttaaagaagatacgtcttttgggggcaacctcggacgagcagtcttccaggcaaaaaagagggttcttgaacctctgggcctggttgaggagcctgttaagacggctccgggaaaaaagaggccggtagagcactctcctgtggagccagactcctcctcgggaaccggaaaagcgggcaaccagcctgcaagaaagagattgaatttcggtcagactggagacgcagactccgtacctgacccccagcctctcggacagccaccagcagccccctctggtctgggaactaatacgatggctacaggcagtggcgcaccaatggcagacaataacgatggcgccgacggagtgggtaattcctcgggaaattggcattgcgattccacatggatgggcgacagagtcatcaccaccagcacccgaacctgggctctgcccacctacaacaaccatctgtacaagcagatttccagccaatcaggagccagcaacgacaaccactactttggctacagcaccccttgggggtattttgacttcaacagattccactgccacttttcaccacgtgactggcaaagactcatcaacaacaactggggattccggcccaagagactcaacttcaagctctttaacattcaagtcagagaggtcacgcagaatgatggtacgacgacgattgccaataaccttaccagcacggttcaggtgtttactgactcggagtaccagctcccgtacgtcctcggctcggcgcatcaaggatgcctcccgccgttcccagcagacgtcttcatggtgccacagtatggatacctcaccctgaacaacgggagtcaggcagtaggacgctcttcattttactgcctggagtacttcccttctcagatgctgcgtaccggaaacaactttaccttcagctacacctttgaggatgttcctttccacagcagctacgctcacagccagagtttggaccgtctcatgaatcctctcatcgaccagtacctgtattacttgagcagaacaaacactccaagcggaaccaccacgcagtccaggcttcagttttctcaggccggagcgagtgacattcgggatcagtctaggaactggcttcctggaccctgttaccgccagcagcgagtatcaaagacatctgcggacaacaacaacagtgaatactcgtggattggagctaccaagtaccacctcaatggcagagactctctggtgaatccgggcccggcaatggccagccacaaggacgatgaagaaaagttttttcctcagagcggggttctcatctttggaaaacaaggatcagagaaaacaaatgtggacattgaaaaggtcatgattacagacgaagaggaaatcagaaccaccaatcccgtggccacggagcagtatggttctgtatctaccaacctccagagcggcaacacacaagcatctactgcagatgtcaacacacaaggcgttcttccaggcatggtctggcaggacagagacgtgtacctgcaggggcctatctgggcaaagattccgcacacggacggacattttcacccctctcccctcatgggcggattcggacttaaacaccctcctccacagattctcatcaaaaacaccccggtacctgcgaatccttcgaccaccttcagtgcggcaaagtttgcttccttcatcacacagtattccacggggcgggtcagcgtggagatcgagtgggagctacagaaggagaacagcaaacgctggaatcccgagatccagtacacttccaactacaacaaatctgttaatgtggactttactgtggacactaatggtgtgtattcagagcctcgccccattggcaccagatacctgactcgtaatctgtaa

SEQ ID NO: 303 - protein, 735 aa, Adeno-associated virus
MAADGYLPDWLEDTLSEGIRQWWKLKPGPPPPKPAERHKDDSRGLVLPGYKYLGPFNGLDKGEPVNEADAAALEHDKAYDRQLDSGDNPYLKYDHADAEFQERLKEDTSFGGNLGRAVFQAKKRVLEPLGLVEEPVKTAPGKKRPVEHSPVEPDSSSGTGKAGNQPARKRLNFGQTGDADSVPDPQPLGQPPAAPSGLGTNTMATGSGAPMADNNDGADGVGNSSGNWHCDSTWMGDRVITTSTRTWALPTYNNHLYKQISSQSGASNDNHYFGYSTPWGYFDFNRFHCHFSPRDWQRLINNNWGFRPKRLNFKLFNIQVREVTQNDGTTTIANNLTSTVQVFTDSEYQLPYVLGSAHQGCLPPFPADVFMVPQYGYLTLNNGSQAVGRSSFYCLEYFPSQMLRTGNNFTFSYTFEDVPFHSSYAHSQSLDRLMNPLIDQYLYYLSRTNTPSGTTTQSRLQFSQAGASDIRDQSRNWLPGPCYRQQRVSKTSADNNNSEYSWIGATKYHLNGRDSLVNPGPAMASHKDDEEKFFPQSGVLIFGKQGSEKTNVDIEKVMITDEEEIRTTNPVATEQYGSVSTNLQSGNTQASTADVNTQGVLPGMVWQDRDVYLQGPIWAKIPHTDGHFHPSPLMGGFGLKHPPPQILIKNTPVPANPSTTFSAAKFASFITQYSTGRVSVEIEWELQKENSKRWNPEIQYTSNYNKSVNVDFTVDTNGVYSEPRPIGTRYLTRNL

SEQ ID NO: 304 - DNA, 2217 bp, Adeno-associated virus
atggctgccgatggttatcttccagattggctcgaggacaacctctctgagggcattcgcgagtggtgggacttgaaacctggagccccgaaacccaaagccaaccagcaaaagcaggacgacggccggggtctggtgcttcctggctacaagtacctcggacccttcaacggactcgacaagggggagcccgtcaacgcggcggacgcagcggccctcgagcacgacaaggcctacgaccagcagctcaaagcgggtgacaatccgtacctgcggtataaccacgccgacgccgagtttcaggagcgtctgcaagaagatacgtcttttgggggcaacctcgggcgagcagtcttccaggccaagaagcgggttctcgaacctctcggtctggttgaggaaggcgctaagacggctcctggaaagaagagaccggtagagccatcaccccagcgttctccagactcctctacgggcatcggcaagacaggccagcagcccgcgaaaaagagactcaactttgggcagactggcgactcagagtcagtgcccgaccctcaaccaatcggagaaccccccgcaggcccctctggtctgggatctggtacaatggctgcaggcggtggcgctccaatggcagacaataacgaaggcgccgacggagtgggtagttcctcaggaaattggcattgcgattccgcatggctgggcgacagagtcatcaccaccagcacccgaccctgggccctccccacctacaacaaccacctctacaagcaaatctccaacgggacatcgggaggaagcaccaacgacaacacctacttcggctacagcaccccctgggggtattttgactttaacagattccactgccacttctcaccacgtgactggcagcgactcatcaacaacaactggggattccggcccaagagactcaacttcaagctcttcaacatccaggtcaaggaggtcacgcagaatgaaggcaccaagaccatcgccaataaccttaccagcacgattcaggtctttacggactcggaataccagctcccgtacgtcctcggctctgcgcaccagggctgcccgcctccgttcccggcggacgtcttcatgattcctcagtacgggtacctgactctgaacaacggcagtcaggccgtgggccgttcctccttctactgcctggagtactttccttctcaaatgcggagaacgggcaacaactttgagttcagctaccagtttgaggacgtgccttttcacagcagctacgcgcatagccaaagcctggaccggctgatgaaccccctcatcgaccagtacctgtactacctgtctcggactcagtccacgggaggtaccgcaggaactcagcagttgctattttctcaggccgggcctaataacatgtcggctcaggccaaaaactggctacccgggccctgctaccggcagcaacgcgtctccacgacactgtcgcaaaataacaacagcaactttgcttggaccggtgccaccaagtatcatctgaatggcagagactctctggtaaatcccggtgtcgctatggcaacgcacaaggacgacgaagagcgattttttccatccagcggagtcttgatgtttgggaaacagggagctggaaaagacaacgtggactatagcagcgttatgctaaccagtgaggaagaaatcaaaaccaccaacccagtggccacagaacagtacggcgtggtggccgataacctgcaacagcaaaacgccgctcctattgtaggggccgtcaacagtcaaggagccttacctggcatggtctggcagaaccgggacgtgtacctgcagggtcctatctgggccaagattcctcacacggacggcaactttcatccttcgccgctgatgggaggctttggactgaaacacccgcctcctcagatcctgattaagaatacacctgttcccgcggatcctccaactaccttcagtcaagccaagctggcgtcgttcatcacgcagtacagcaccggacaggtcagcgtggaaattgaatgggagctgcagaaagagaacagcaagcgctggaacccagagattcagtatacttccaactactacaaatctacaaatgtggactttgctgtcaatactgagggtacttattcagagcctcgccccattggcacccgttacctcacccgtaacctgtaa

SEQ ID NO: 305 - protein, 738 aa, Adeno-associated virus
MAADGYLPDWLEDNLSEGIREWWDLKPGAPKPKANQQKQDDGRGLVLPGYKYLGPFNGLDKGEPVNAADAAALEHDKAYDQQLKAGDNPYLRYNHADAEFQERLQEDTSFGGNLGRAVFQAKKRVLEPLGLVEEGAKTAPGKKRPVEPSPQRSPDSSTGIGKTGQQPAKKRLNFGQTGDSESVPDPQPIGEPPAGPSGLGSGTMAAGGGAPMADNNEGADGVGSSSGNWHCDSAWLGDRVITTSTRPWALPTYNNHLYKQISNGTSGGSTNDNTYFGYSTPWGYFDFNRFHCHFSPRDWQRLINNNWGFRPKRLNFKLFNIQVKEVTQNEGTKTIANNLTSTIQVFTDSEYQLPYVLGSAHQGCPPPFPADVFMIPQYGYLTLNNGSQAVGRSSFYCLEYFPSQMRRTGNNFEFSYQFEDVPFHSSYAHSQSLDRLMNPLIDQYLYYLSRTQSTGGTAGTQQLLFSQAGPNNMSAQAKNWLPGPCYRQQRVSTTLSQNNNSNFAWTGATKYHLNGRDSLVNPGVAMATHKDDEERFFPSSGVLMFGKQGAGKDNVDYSSVMLTSEEEIKTTNPVATEQYGVVADNLQQQNAAPIVGAVNSQGALPGMVWQNRDVYLQGPIWAKIPHTDGNFHPSPLMGGFGLKHPPPQILIKNTPVPADPPTTFSQAKLASFITQYSTGQVSVEIEWELQKENSKRWNPEIQYTSNYYKSTNVDFAVNTEGTYSEPRPIGTRYLTRNL

SEQ ID NO: 306 - protein, 735 aa, Adeno-associated virus
MAADGYLPDWLEDTLSEGIRQWWKLKPGPPPPKPAERHKDDSRGLVLPGYKYLGPFNGLDKGEPVNEADAAALEHDKAYDRQLDSGDNPYLKYNHADAEFQERLKEDTSFGGNLGRAVFQAKKRVLEPLGLVEEPVKTAPGKKRPVEHSPVEPDSSSGTGKAGQQPARKRLNFGQTGDADSVPDPQPLGQPPAAPSGLGSTTMATGSGAPMADNNEGADGVGNSSGNWHCDSQWLGDRVITTSTRTWALPTYNNHLYKQISSQSGASNDNHYFGYSTPWGYFDFNRFHCHFSPRDWQRLINNNWGFRPKRLNFKLFNIQVKEVTQNDGTTTIANNLTSTVQVFTDSEYQLPYVLGSAHQGCLPPFPADVFMVPQYGYLTLNNGSQAVGRSSFYCLEYFPSQMLRTGNNFQFSYTFEDVPFHSSYAHSQSLDRLMNPLVDQYLYYLNKTQTNSGTLQQSRLLFSQAGPTNMSLQAKNWLPGPCYRQQRLSKQANDNNNSNFPWTAATKYHLNGRDSLVNPGPAMASHKDDEEKFFPMHGTLIFGKQGTNANDADLENVMITDEEEIRTTNPVATEQYGTVSNNLQNSNTGPTTGTVNHQGALPGMVWQDRDVYLQGPIWAKIPHTDGHFHPSPLMGGFGLKHPPPQIMIKNTPVPANPPTNFSSAKFASFITQYSTGQVSVEIEWELQKENSKRWNPEIQYTSNYNKSVNVDFTVDTNGVYSEPRPIGTRYLTRNL

SEQ ID NO: 307 - DNA, 3158 bp, Adeno-associated virus
gattgaatttagcggccgcgaattcgcccttgctgcgtcaactggaccaatgagaactttcctttcaatgattgcgtcgacaagatggtgatctggtgggaggagggaaagatgaccgccaaggtcgtggagtcggccaaagccattctcggaggaagcaaggtgcgcgcggaccagaaatgcaagtcctcggcccagatagacccgactcccgtgattgtcacctccaacaccaacatgtgcgccgtgattgacgggaactcaacgaccttcgaacaccagcagccgttgcaagaccggatgttcaaatttgaactcacccgccgtctggatcatgactttgggaaggtcaccaagcaggaagtcaaagactttttccggtgggcaaaggatcacgtggttgaggtggagcatgaattctacgtcaaaaagggtggagctaagaaaagacccgcccccagtgacgcagatataagtgagcccaaacgggcgcgcgagtcagttgcgcagccatcgacgtcagacgcggaagcttcgatcaactacgcgggcaggtaccaaaacaaatgttctcgtcacgtgggcatgaatctgatgctgtttccctgcagacaatgcgagagaatgaatcagaattcaaatatctgcttcactcacggacagaaagactgtttagagtgctttcccgtgtcagaatctcaacccgtttctgtcgtcaaaaaggcgtatcagaaactttgctacattcatcatatcatgggaaaggtgccagacgcttgcactgcctgcgatctggtcaatgtggatttggatgactgcatctctgaacaataaatgatttaaatcaggtatggctgccgatggttatcttccagattggctcgaggacactctctctgaaggaataagacagtggtggaagctcaaacctggcccaccaccaccaaagcccgcagagcggcataaggacgacagcaggggtcttgtgcttcctgggtacaagtacctcggacccttcaacggactcgacaagggggagccggtcaacgaggcagacgccgcggccctcgagcacgacaaggcctacgaccggcagctcgacagcggagacaacccgtacctcaagtacaaccacgccgacgcggagtttcaggagcgccttaaagaagatacgtcttttgggggcaacctcggacgagcagtcttccaggcaaaaaagagggttcttgaacctctgggcctggttgaggaacctgttaaaacggctccgggaaaaaagaggccggtagagcactctcctgtggagccagactcctcctcgggaaccggaaaagcgggccagcagcctgcaagaaaaagattgaatttcggtcagactggagacgcagactccgtacctgacccccagcctctcggacagccaccagcagccccctctggtctgggatctactacaatggctacaggcagtggcgcaccaatggcagacaataacgagggtgccgatggagtgggtaattcctcgggaaattggcattgcgattcccaatggctgggcgacagagtcatcaccaccagcacccgcacctgggccctgcccacctacaacaaccacctctacaagcaaatctccagccaatcaggagcctcaaacgacaaccactactttggctacagcaccccctgggggtattttgacttcaacagattccactgccacttttcaccacgtgactggcaaagactcatcaacaacaactggggattccgacccaagagactcaacttcaagctctttaacattcaagtcaaagaggtcacgcagaatgacggtacgacgacgattgccaataaccttaccagcacggttcaggtgtttactgactcggagtaccagctcccgtacgtcctcggctcggcgcatcaaggatgcctcccgccgtttccagcggacgtcttcatggtcccacagtatggatacctcaccctgaacaacgggagtcaggcagtaggacgctcttcattttactgcctggagtactttccttctcagatgctgcgtaccggaaacaactttcaattcagctacacttttgaagacgtgcctttccacagcagctacgctcacagccagagtctggatcggctgatgaatcctctggtcgaccagtacctgtattatctgaacaagacacaaacaaatagtggaactcttcagcagtctcggctactgtttagccaagctggacccaccaacatgtctcttcaagctaaaaactggctgcctggaccttgctacagacagcagcgtctgtcaaagcaggcaaacgacaacaacaacagcaactttccctggactgcagctacaaagtatcatctaaatggccgggactcgttggttaatccaggaccagctatggccagtcacaaggatgacgaagaaaagtttttccccatgcatggaacccttatatttggtaaacaaggaacaaatgccaacgacgcggatttggaaaatgtcatgattacagatgaagaagaaatcaggaccaccaatcccgtggctacggagcagtacggaactgtatcaaataatttgcaaaactcaaacactggtccaactactggaactgtcaatcaccaaggagcgttacctggtatggtgtggcaggatcgagacgtgtacctgcagggacccatttgggccaagattcctcacaccgatggacactttcatccttctccactgatgggaggttttggactcaaacacccacctcctcaaatcatgatcaaaaacactcccgttccagccaatcctcccacaaacttcagttctgccaagtttgcttctttcatcacacagtattccacggggcaggtcagcgtggagatcgagtgggagctgcagaaggagaacagcaaacgctggaatcccgaaattcagtacacttccaactacaacaaatctgttaatgtggactttactgtggacactaatggtgtgtattcagagcctcgccccattggcaccagatacctgactcgtaatctgtaattgcttgttaatcaataaaccgtttaattcgtttcagttgaactttggtctctgcgaagggcgaattcgtttaaacctgcaggactagtccctttagtga

SEQ ID NO: 308 - protein, 735 aa, Adeno-associated virus
MAADGYLPDWLEDTLSEGIRQWWKLKPGPPPPKPAERHKDDSRGLVLPGYKYLGPFNGLDKGEPVNEADAAALEHDKAYDRQLDSGDNPYLKYNHADAEFQERLKEDTSFGGNLGRAVFQAKKRVLEPLGLVEEPVKTAPGKKRPVEHPPVEPDSSSGTGKAGQQPARKRLNFGQTGDADSVPDPQPLGQPPAAPSGLGSTTMATGSGAPMADNNEGADGVGNSSGNWHCDSQWLGDRVITTSTRTWALPTYNNHLYKQISSQSGASNDNHYFGYSTPWGYFDFNRFHCHFSPRDWQRLINNNWGFRPKRLNFKLFNIQVKEVTQNDGTTTIANNLTSTVQVFTDSEYQLPYVLGSAHQGCLPPFPADVFMVPQYGYLTLNNGSQAVGRSSFYCLEYFPSQMLRTGNNFQFSYTFEDVPFHSSYAHSQSLDRLMNPLIDQYLYYLNKTQTNSGTLQQSRLLFSQAGPTNMSLQAKNRLPGPCYRQQRLSKQANDNNNSNFPWTAATKYHLNGRDSLVNPGPAMASHKDDEEKFFPMHGTLIFGKQGTNANDADLENVMITDEEEIRTTNPVATEQYGTVSNNLQNSNTGPTTGTVNHQGALPGMVWQDRDVYLQGPIWAKIPHTDGHFHPSPLVGGFGLKHPPPQIMIKNTPVPANPPTNFSSAKFASFITQYSTGQVSVEIEWELQKENSKRWNPEIQYTSNYNKSVNVDFTVDTNGVYSEPRPIGTRYLTRNL

SEQ ID NO: 309 - DNA, 3159 bp, Adeno-associated virus
gattgaatttagcggccgcgaattcgcccttgctgcgtcaactggaccaatgagaactttcctttcaatgattgcgtcgacaagatggtgatctggtgggaggagggaaagatgaccgccaaggtcgtggagtcggccaaagccattctcggaggaagcaaggtgcgcgtggaccagaaatgcaagtcctcggcccagatagacccgactcccgtgattgtcacctccaacaccgacatgtgcgccgtgattgacgggaactcaacgaccttcgaacaccagcagccgttgcaagaccggatgttcaaatttgaactcacccgccgtctggatcatgactttgggaaggtcaccaagcaggaagtcaaagactttttccggtgggcaaaggatcacgtggttgaggtggagcatgaattctacgtcaaaaagggtggagctaagaaaagacccgcccccagtgacgcagatataagtgagcccaaacgggcgcgcgagtcagttgcgcagccatcgacgtcagacgcggaagcttcgatcaactacgcggacaggtaccaaaacaaatgttctcgtcacgtgggcatgaatctgatgctgtttccctgcagacaatgcgagagaatgaatcagaattcaaatatctgcttcactcacggacagaaagactgtttagagtgctttcccgtgtcagaatctcaacccgtttctgtcgtcaaaaaggcgtatcagaaactttgctacattcatcatatcatgggaaaggtgccagacgcttgcactgcctgcgatctggtcaatgtggatttggatgactgcatctctgaacaataaatgatttaaatcaggtatggctgccgatggttatcttccagattggctcgaggacactctctctgaaggaataagacagtggtggaagctcaaacctggcccaccaccaccaaagcccgcagagcggcataaggacgacagcaggggtcttgtgcttcctgggtacaagtacctcggacccttcaacggactcgacaagggggagccggtcaacgaggcagacgccgcggccctcgagcacgacaaggcctacgaccggcagctcgacagcggagacaacccgtacctcaagtacaaccacgccgacgcggagtttcaggagcgccttaaagaagatacgtcttttgggggcaacctcggacgagcagtcttccaggcaaaaaagagggttcttgaacctctgggcctggttgaggaacctgttaaaacggctccgggaaaaaagaggccggtagagcaccctcctgtggagccagactcctcctcgggaaccggaaaagcgggccagcagcctgcaagaaaaagattgaatttcggtcagactggagacgcagactccgtacctgacccccagcctctcggacagccaccagcagccccctctggtctgggatctactacaatggctacaggcagtggcgcaccaatggcagacaataacgagggtgccgatggagtgggtaattcctcgggaaattggcattgcgattcccaatggctgggcgacagagtcatcaccaccagcacccgcacctgggccctgcccacctacaacaaccacctctacaagcaaatctccagccaatcaggagcctcaaacgacaaccactactttggctacagcaccccctgggggtattttgacttcaacagattccactgccacttttcaccacgtgactggcaaagactcatcaacaacaactggggattccgacccaagagactcaacttcaagctctttaacattcaagtcaaagaggtcacgcagaatgacggtacgacgacgattgccaataaccttaccagcacggttcaggtgtttactgactcggagtaccagctcccgtacgtcctcggctcggcgcatcaaggatgcctcccgccgtttccagcggacgtcttcatggtcccacagtatggatacctcaccctgaacaacgggagtcaggcagtaggacgctcttcattttactgcctggagtactttccttctcagatgctgcgtaccggaaacaactttcagttcagctacacttttgaagacgtgcctttccacagcagctacgctcacagccagagtctggatcggctgatgaatcctctgatcgaccagtacctgtattatctgaacaagacacaaacaaatagtggaactcttcagcagtctcggctactgtttagccaagctggacccaccaacatgtctcttcaagctaaaaaccggctgcctggaccttgctacagacagcagcgtctgtcaaagcaggcaaacgacaacaacaacagcaactttccctggaccgcagctacaaagtatcatctaaatggccgggactcgttggttaatccaggaccagctatggccagtcacaaggatgacgaagaaaagtttttccccatgcatggaacccttatatttggtaaacaaggaacaaatgccaacgacgcggatttggaaaatgtcatgattacagatgaagaagaaatcaggaccaccaatcccgtggctacggagcagtacggaactgtatcaaataatttgcaaaactcaaacactggtccaactactggaactgtcaatcaccaaggagcgttacctggtatggtgtggcaggatcgagacgtgtacctgcagggacccatttgggccaagattcctcacaccgatggacactttcatccttctccactggtgggaggttttggactcaaacacccacctcctcaaatcatgatcaaaaacactcccgttccagccaatcctcccacaaacttcagttctgccaagtttgcttctttcatcacacagtattccacggggcaggtcagcgtggagatcgagtgggagctgcagaaggagaacagcaaacgctggaatcccgaaattcagtacacttccaactacaacaaatctgttaatgtggactttactgtggacactaatggtgtgtattcagagcctcgccccattggcaccagatacctgactcgtaatctgtaattgcttgttaatcaataaaccgtttaattcgtttcagttgaactttggtctctgcgaagggcgaattcgtttaaacctgcaggactagtccctttagtgag

SEQ ID NO: 310 - DNA, 2208 bp, Adeno-associated virus
atggctgccgatggttatcttccagattggctcgaggacactctctctgaaggaataagacagtggtggaagctcaaacctggcccaccaccaccaaagcccgcagagcggcataaggacgacagcaggggtcttgtgcttcctgggtacaagtaccttggacccttcaacggactcgacaagggagagccggtcaacgaggcagacgccgcggccctcgagcacgacaaggcctacgaccggcagctcgacagcggagacaacccgtaccccaagtacaaccacgccgacgcggagttccaggagcgtcttaaagaagatacgtcttttgggggcaacctcggacgagcagtcttccaggcgaaaaagagggttcttgaacctctgggcctggttgaggaacctgttaagacggctccgggaaaaaagaggccggtagagcactctcctgcggagccagactcctcctcgggaaccggaaaagcgggccagcagcctgcaagaaagagattgaatttcggtcagactggagacgcagactccgtacctgacccccagcctctcggacagccaccagcagccccctctggtctgggaactaatacgatggctacaggcagtggcgcaccaatggcagacaataacgagggcgccgacggagtgggtaattcctcgggaaattggcattgcgattccacatggatgggcgacagagtcatcaccaccagcacccgcacctgggctctgcccacctacaacaaccacctctacaagcagatttccagccaatcaggagcctcaaacgacaaccactactttggctacagcaccccttgggggtattttgacttcaacagattccactgccacttttcgccacgtgactggcaaagactcatcaacaacaattggggattccggcccaaaagactcaacttcaagctctttaacattcaagtcaaggaggtcacgcagaatgacggtacgacgacgattgccaataaccttaccagcacggttcaggtgtttactgactcggagtaccagctcccgtacgtcctcggctcggcgcatcaaggatgcctcccgccgttcccagcagacgtcttcatggtgccacagtatggatacctcaccctgaacaacgggagtcaggcagtaggacgctcttcattttactgcctggagtactttccttctcagatgctgcgtaccggaaacaactttaccttcagctacacctttgaggacgttcctttccacagcagctacgcccacagccagagtttggaccgtctcatgaatcctctcatcgaccagtacctgtattacttgagcagaacaaacactccaagcggaaccaccacgcagtcaaggcttcagttttctcaggccggagcaagtgacattcgggaccagtctaggaactggcttcctggaccctgttaccgccagcagcgagtatcaaagacatctgcggataacaacaacagtgaatactcgtggactggagctaccaagtaccaccttaatggaagagactctctggtgaatccgggcccggccatggccagccacaaggacgatgaagaaaagttttttcctcagagcggggttctcatctttggaaaacaagactcgggaaaaactaatgtggacattgaaaaggtcatgattacagacgaagaggaaatcaggaccaccaatcccgtggctacggagcagtatggttctgtatctaccaacctccagagcggcaacacacaagcagctacctcagatgtcaacacacaaggcgttcttccaggcatggtgtggcaggacagagacgtgtacctgcaggggcccatctgggcaaagattccacacacggacggacattttcacccctctcccctcatgggcggattcggacttaaacaccctcccccgcagattctcatcaagaacaccccggtacctgcgaatccttcgactaccttcagtgcggcaaagtttgcttccttcattacacagtactccacggggcaggtcagcgtggagatcgagtgggagctgcagaaggagaacagcaaacgctggaatcccgagattcagtacacttccaactacaacaaatctgttaatgtggactttactgtggacactaatggtgtgtattcagagcctcgccccattggcaccaggtacctgactcgtaatctgtaa

SEQ ID NO: 311 - protein, 735 aa, Adeno-associated virus
MAADGYLPDWLEDTLSEGIRQWWKLKPGPPPPKPAERHKDDSRGLVLPGYKYLGPFNGLDKGEPVNEADAAALEHDKAYDRQLDSGDNPYPKYNHADAEFQERLKEDTSFGGNLGRAVFQAKKRVLEPLGLVEEPVKTAPGKKRPVEHSPAEPDSSSGTGKAGQQPARKRLNFGQTGDADSVPDPQPLGQPPAAPSGLGTNTMATGSGAPMADNNEGADGVGNSSGNWHCDSTWMGDRVITTSTRTWALPTYNNHLYKQISSQSGASNDNHYFGYSTPWGYFDFNRFHCHFSPRDWQRLINNNWGFRPKRLNFKLFNIQVKEVTQNDGTTTIANNLTSTVQVFTDSEYQLPYVLGSAHQGCLPPFPADVFMVPQYGYLTLNNGSQAVGRSSFYCLEYFPSQMLRTGNNFTFSYTFEDVPFHSSYAHSQSLDRLMNPLIDQYLYYLSRTNTPSGTTTQSRLQFSQAGASDIRDQSRNWLPGPCYRQQRVSKTSADNNNSEYSWTGATKYHLNGRDSLVNPGPAMASHKDDEEKFFPQSGVLIFGKQDSGKTNVDIEKVMITDEEEIRTTNPVATEQYGSVSTNLQSGNTQAATSDVNTQGVLPGMVWQDRDVYLQGPIWAKIPHTDGHFHPSPLMGGFGLKHPPPQILIKNTPVPANPSTTFSAAKFASFITQYSTGQVSVEIEWELQKENSKRWNPEIQYTSNYNKSVNVDFTVDTNGVYSEPRPIGTRYLTRNL

SEQ ID NO: 312 - DNA, 2208 bp, Adeno-associated virus
atggctgccgatggttatcttccagattggctcgaggacactctctctgaaggaataagacagtggtggaagctcaaacctggcccaccaccaccaaagcccgcagagcggcataaggacgacagcaggggtcttgtgcttcctgggtacaagtaccttggacccttcaacggactcgacaagggagagccggtcaacgaggcagacgccgcggccctcgagcacgacaaggcctacgaccggcagctcgacggcggagacaacccgtacctcaagtacaaccacgccgacgcggagttccaggagcgtcttaaagaagatacgtcttttgggggcaacctcggacgagcagtcttccaggcgaaaaagagggttcttgaacctctgggcctggttgaggaacctgttaagacggctccgggaaaaaagaggccggtagagcactctcttgcggagccagactcctcctcgggaaccggaaaagcgggccagcagcctgcaagaaggagattgaatttcggtcagactggagacgcagactccgtacctgacccccagcctctcggacagccaccagcagccccctctggtctgggaactaatacgatggctacaggcagtggcgcaccaatggcagacaataacgagggcgccgacggagtgggtaattcctcgggaaattggcattgcgattccacatggatgggcgacagagtcatcaccaccagcacccgcacctgggctctgcccacctacaacaaccacctctacaggcagatttccagccaatcaggagcctcaaacgacaaccactactttggctacagcaccccttgggggtattttgacttcaacagattccactgccacttttcgccacgtgactggcaaagactcatcaacaacaattggggatcccggcccaaaagactcaacttcaagctctttaacattcaagtcaaggaggtcacgcagaatgacggtacgacgacgattgccaataaccttaccagcacggttcaggtgtttactgactcggagtaccagctcccgtacgtcctcggctcggcgcatcaaggatgcctcccgccgttcccagcagacgtcttcatggtgccacagtatggatacctcaccctgaacaacgggagtcaggcagtaggacgctcttcattttactgcctggagtactttccttctcagatgctgcgtaccggaaacaactttaccttcagctacacctttgaggacgttcctttccacagcagctacgcccacagccagagtttggaccgtctcatgaatcctctcgtcgaccagtacctgtattacttgagcagaacaaacactccaagcggaaccaccacgcagtcaaggcttcagttttctcaggccggagcaagtgacattcgggaccagtctaggaactggcttcctggaccctgttaccgccagcagcgagtatcaaagacatctgcggataacaacaacagtgaatactcgtggactggagctaccaagtaccaccttaatggaagagactctctggtgaatccgggcccggccatggccagccacaaggacgatgaagaaaagttttttcctcagagcggggttctcatctttggaaaacaagactcgggaaaaactaatgtggacattgaaaaggtcatgattacagacgaagaggaaatcaggaccaccaatcccgtggctacggagcagtatggttctgtatctaccaacctccagagcggcaacacacaagcagctacctcagatgtcaacacacaaggcgttcttccaggcatggtgtggcaggacagagacgtgtacctgcaggggcccatctgggcaaagattccacacacggacggacattttcacccctctcccctcatgggcggattcggacttaaacaccctcccccgcagattctcatcaagaacaccccggtacctgcgaatccttcgactaccttcagtgcggcaaagtttgcttccttcattacacagtactccacggggcaggtcagcgtggagatcgagtgggagctgcagaaggagaacagcaaacgctggaatcccgagattcagtacacttccaactacaacaaatctgttaatgtggactttactgtggacactaatggtgtgtattcagagcctcgccccattggcaccagatacctgactcgtaatctgtaa

SEQ ID NO: 313 - protein, 735 aa, Adeno-associated virus
MAADGYLPDWLEDTLSEGIRQWWKLKPGPPPPKPAERHKDDSRGLVLPGYKYLGPFNGLDKGEPVNEADAAALEHDKAYDRQLDGGDNPYLKYNHADAEFQERLKEDTSFGGNLGRAVFQAKKRVLEPLGLVEEPVKTAPGKKRPVEHSLAEPDSSSGTGKAGQQPARRRLNFGQTGDADSVPDPQPLGQPPAAPSGLGTNTMATGSGAPMADNNEGADGVGNSSGNWHCDSTWMGDRVITTSTRTWALPTYNNHLYRQISSQSGASNDNHYFGYSTPWGYFDFNRFHCHFSPRDWQRLINNNWGSRPKRLNFKLFNIQVKEVTQNDGTTTIANNLTSTVQVFTDSEYQLPYVLGSAHQGCLPPFPADVFMVPQYGYLTLNNGSQAVGRSSFYCLEYFPSQMLRTGNNFTFSYTFEDVPFHSSYAHSQSLDRLMNPLVDQYLYYLSRTNTPSGTTTQSRLQFSQAGASDIRDQSRNWLPGPCYRQQRVSKTSADNNNSEYSWTGATKYHLNGRDSLVNPGPAMASHKDDEEKFFPQSGVLIFGKQDSGKTNVDIEKVMITDEEEIRTTNPVATEQYGSVSTNLQSGNTQAATSDVNTQGVLPGMVWQDRDVYLQGPIWAKIPHTDGHFHPSPLMGGFGLKHPPPQILIKNTPVPANPSTTFSAAKFASFITQYSTGQVSVEIEWELQKENSKRWNPEIQYTSNYNKSVNVDFTVDTNGVYSEPRPIGTRYLTRNL

SEQ ID NO: 314 - protein, 738 aa, Adeno-associated virus
MAADGYLPDWLEDNLSEGIREWWDLKPGAPKPKANQQKQDDGRGLVLPGYKYLGPFNGLDKGEPVNAADAAALEHDKAYDQQLKAGDNPYLRYNHADAEFQERLQEDTSFGGNLGRAVFQAKKRVLEPLGLVEEAAKTAPGKKRPVEPSPQRSPDSSAGIGKKGQQPAKKRLNFGQTGDSESVPDPQPIGEPPAGPSGLGSGTMAAGGGAPMADNNEGADGVGSSSGNWHCDSTWLGDRVITTSTRTWALPTYNNHLYKQISNGTSGGSTNDNTYFGYSTPWGYFDFNRFHCHFSPRDWQRLINNNWGFRPKRLSFKLFNIQVKEVTQNEGTETIANNLTSTIQVFTDSEYQLPYVLGSAHQGCLPPFPADVFMIPQYGYLTLNNGSQAVGRSSFYCLEYFPSQMLRTGNNFEFSYTFEDVPFHSSCAHSQSSDRLMNPLIDQYLYYLSRTRSTGGTQGTQQLLFSQAGPANMSAQAKNWLPGPCYRQQRVSTTLSQNNNSNFAWTGATKYHLNGRDSLVNPGVAMATHKDDEERFFPSSGVLMFGKQGAGRDNVDYSSVMLTSEEEIKTTNPVATEQYGVVADNLQQTNTGPIVGNVNSQGALPGMVWQNRDVYLQGPIWAKIPHTDGNFHPSPLMGGFGLKHPPPQILIKNTPVPADPPTTFSQAKLASFITQYSTGQVSVEIEWELQKENSKRWNPEIQYTSNYYKSTNVDFAVNTEGTYSEPRPIGTRYLTRNL

SEQ ID NO: 315 - DNA, 2217 bp, Adeno-associated virus
atggctgctgacggttatcttccagattggctcgaggacaacctctctgagggcattcgcgagtggtgggacctgaaacctggagcccccaagcccaaggccaaccagcagaagcaggacgacggccggggtctggtgcttcttggctacaagtacctcggacccttcaacggactcgacaagggggagcccgtcaatgcggcggacgcagcggccctcgagcacgacaaggcctacgaccagcagctcaaagcgggtgacaatccgtacctgcggtataaccacgccgacgccgagtttcaggagcgtctgcaagaagatacgtcttttgggggcaacctcgggcgagcagtcttccaggccaagaagcgggttctcgaacctctcggtctggttgaggaagctgctaagacggctcctggaaagaagagaccggtagaaccgtcacctcagcgttcccccgactcctccacgggcatcggcaagaaaggccagcagcccgctaaaaagagactgaactttggtcagactggcgactcagagtcagtccccgaccctcaaccaatcggagaaccaccagcaggcccctctggtctgggatctggtacaatggctgcaggcggtggcgctccaatggcagacaataacgaaggcgccgacggagtgggtagttcctcaggaaattggcattgcgattccacatggctgggcgacagagtcatcaccaccagcacccgaacctgggccctgcccacctacaacaaccacctctacaagcaaatatccaatgggacatcgggaggaagcaccaacgacaacacctacttcggctacagcaccccctgggggtattttgacttcaacagattccactgccacttctcaccacgtgactggcagcgactcatcaacaacaactggggattccggccaaaaagactcagcttcaagctcttcaacatccaggtcaaggaggtcacgcagaatgaaggcaccaagaccatcgccaataaccttaccagcacgattcaggtatttacggactcggaataccagctgccgtacgtcctcggctccgcgcaccagggctgcctgcctccgttcccggcggacgtcttcatgattccccagtacggctaccttacactgaacaatggaagtcaagccgtaggccgttcctccttctactgcctggaatattttccatctcaaatgctgcgaactggaaacaattttgaattcagctacaccttcgaggacgtgcctttccacagcggctacgcacacagccagagcttggaccgactgatgaatcctctcatcgaccagtacctgtactacttatccagaactcagtccacaggaggaactcaaggtacccagcaattgttattttctcaagctgggcctgcaaacatgtcggctcaggctaagaactggctacctggaccttgctaccggcagcagcgagtctctacgacactgtcgcaaaacaacaacagcaactttgcttggactggtgccaccaaatatcacctgaacggaagagactctttggtaaatcccggtgtcgccatggcaacccacaaggacgacgaggaacgcttcttcccgtcgagtggagtcctgatgtttggaaaacagggtgctggaagagacaatgtggactacagcagcgttatgctaaccagcgaagaagaaattaaaaccactaaccctgtagccacagaacaatacggtgtggtggctgacaacttgcagcaaaccaatacagggcctattgtgggaaatgtcaacagccaaggagccttacctggcatggtctggcagaaccgagacgtgtacctgcagggtcccatctgggccaagattcctcacacggacggcaacttccacccttcaccgctaatgggaggatttggactgaagcacccacctcctcagatcctgatcaagaacacgccggtacctgcggatcctccaacgacgttcagccaggcgaaattggcttccttcattacgcagtacagcaccggacaggtcagcgtggaaatcgagtgggagctgcagaaggagaacagcaaacgctggaacccagagattcagtacacttcaaactactacaaatctacaaatgtggactttgctgtcaatacagagggaacttattctgagcctcgccccattggtactcgttacctcacccgtaatctgtaa

SEQ ID NO: 316 - protein, 738 aa, Adeno-associated virus
MAADGYLPDWLEDNLSEGIREWWDLKPGAPKPKANQQKQDDGRGLVLLGYKYLGPFNGLDKGEPVNAADAAALEHDKAYDQQLKAGDNPYLRYNHADAEFQERLQEDTSFGGNLGRAVFQAKKRVLEPLGLVEEAAKTAPGKKRPVEPSPQRSPDSSTGIGKKGQQPAKKRLNFGQTGDSESVPDPQPIGEPPAGPSGLGSGTMAAGGGAPMADNNEGADGVGSSSGNWHCDSTWLGDRVITTSTRTWALPTYNNHLYKQISNGTSGGSTNDNTYFGYSTPWGYFDFNRFHCHFSPRDWQRLINNNWGFRPKRLSFKLFNIQVKEVTQNEGTKTIANNLTSTIQVFTDSEYQLPYVLGSAHQGCLPPFPADVFMIPQYGYLTLNNGSQAVGRSSFYCLEYFPSQMLRTGNNFEFSYTFEDVPFHSGYAHSQSLDRLMNPLIDQYLYYLSRTQSTGGTQGTQQLLFSQAGPANMSAQAKNWLPGPCYRQQRVSTTLSQNNNSNFAWTGATKYHLNGRDSLVNPGVAMATHKDDEERFFPSSGVLMFGKQGAGRDNVDYSSVMLTSEEEIKTTNPVATEQYGVVADNLQQTNTGPIVGNVNSQGALPGMVWQNRDVYLQGPIWAKIPHTDGNFHPSPLMGGFGLKHPPPQILIKNTPVPADPPTTFSQAKLASFITQYSTGQVSVEIEWELQKENSKRWNPEIQYTSNYYKSTNVDFAVNTEGTYSEPRPIGTRYLTRNL

SEQ ID NO: 317 - protein, 735 aa, Adeno-associated virus
MAADGYLPDWLEDTLSEGIRQWWKLKPGPPPPKPAERHKDDSRGLVLPGYKYLGPFNGLDKGEPVNEADAAALEHDKAYDRQLDSGDNPYLKYNHADAEFQERLKEDTSFGGNLGRAVFQAKKRVLEPLGLVEPPVKTAPGKKRPVEHSPAEPDSSSGTGKAGQQPARKRLNFGQTGDADSVPDPQPLGQPPAAPSGLGSTTMATGSGAPMADNNEGADGVGNSSGNWHCDSQWLGDRVITTSTRTWALPTYNNHLYKQISSQSGASNDNHYFGYSTPWGYFDFNRFHCHFSPRDWQRLINNNWGFRPKRLNFKLFNIQVKEVTQNDGTTTIANNLTSTVQVFTDSEYQLPYVLGSAHQGCLPPFPADVFMVPQYGYLTLNNGSQAVGRSSFYCLEYFPSQMLRTGNNFQFSYTFEDVPFHSSYAHSQSLDRLMNPLIDQYLYYLNKTQSNSGTLQQSRLLFSQAGPTSMSLQAKNWLPGPCYRQQRLSKQANDNNNSNFPWTAATKYHLNGRDSLVNPGPAMASHKDDEEKFFPMHGTLIFGKQGTNANDADLDNVMITDEEEIRTTNPVATEQYGYVSNNLQNSNTGPTTGTVNHQGALPGMVWQDRDVYLQGPIWAKIPHTDGHFHPSPLMGGFGLKHPPPQIMIKNTPVPANPPTNFSSAKFASFITQYSTGQVSVEIEWELQKENSKRWNPEIQYTSNYNKSVNVDFTVDTNGVYSEPRPIGTRYLTRNL

SEQ ID NO: 318 - protein, 735 aa, Adeno-associated virus
MAADGYLPDWLEDTLSEGIRQWWKLKPGPPPPKPAERHKDDSRGLVLPGYKYLGPFNGLDKGEPVNEADAAALEHDKAYDRQLDSGDNPYLKYNHADAEFQERLKEDTSFGGNLGRAVFQAKKRVLEPLGLVEGPVKTAPGKKRPVEHSPAEPDSSSGTGKAGQQPARKRLNFGQTGDADSVPDPQPLGQPPAAPSGLGSTTMATGSGAPMADNNEGADGVGNSSGNWHCDSQWLGDRVITTSTRTWALPTYNNHLYKQISSQSGASNDNHYFGYSTPWGYFDFNRFHCHFSPRDWQRLINNNWGFRPKRLNFKLFNIQVKEVTQNDGTTTIANNLTSTVQVFTDSEYQLPYVLGSAHQGCLPPFPADVFMVPQYGYLTLNNGSQAVGRSSFYCLEYFPSQMLRTGNNFQFSYTFEDVPFHSSYAHSQSLDRLMNPLIDQYLYYLNKTQSNSGTLQQSRLLFSQAGPTSMSLQAKNWLPGPCYRQQRLSKQANDNNNSNFPWTAATKYHLNGRDSLVNPGPAMASHKDDEEKFFPMHGTLIFGKQGTNANDADLDNVMITDEEEIRTTNPVATEQYGYVSNNLQNSNTGPTTGTVNHQGALPGMVWQDRDVYLQGPIWAKIPHTDGHFHPSPLMGGFGLKHPPPQIMIKNTPVPANPPTNFSSAKFASFITQYSTGQVSVEIEWELQKENSKRWNPEIQYTSNYNKSVNVDFTVDTNGVYSEPRPIGTRYLTRNL

SEQ ID NO: 319 - DNA, 2208 bp, Adeno-associated virus
atggctgccgatggttatcttccagattggctcgaggacactctctctgaaggaataagacagtggtggaagctcaaacctggcccaccaccaccaaagcccgcagagcggcataaggacgacagcaggggtcttgtgcttcctgggtacaagtacctcggacccttcaacggactcgacaagggggagccggtcaacgaggcagacgccgcggccctcgagcacgacaaggcctacgaccggcagctcgacagcggagacaacccgtacctcaagtacaaccacgccgacgcggagtttcaggagcgtcttaaagaagatacgtcttttgggggcaacctcggacgagcagtcttccaggcgaaaaagagggttcttgaacctctgggcctggttgagggacctgttaagacggctccgggaaaaaagaggccggtagagcactctcctgcggagccagactcctcctcgggaaccggaaaagcgggccagcagcctgcaagaaaaagattgaattttggtcagactggagacgcagactccgtacctgacccccagcctctcggacagccaccagcagccccctctggtttgggatctactacaatggctacaggcagtggcgcaccaatggcagacaataacgagggtgccgatggagtgggtaattcctcaggaaattggcattgcgattcccaatggctgggcgacagagtcatcaccaccagcacccgaacctgggccctgcccacctacaacaaccacctctacaagcaaatctcaagccaatcaggagcctcaaacgacaaccactactttggctacagcaccccttgggggtattttgacttcaacagattccactgccacttttcaccacgtgactggcaaagactcatcaacaacaactggggattccgacccaagagactcaacttcaagctctttaacattcaagtcaaagaggtcacgcagaatgacggtacgacgacgattgccaataaccttaccagcacggttcaggtgtttactgactcggagtaccagctcccgtacgtcctcgggtcggcgcatcaaggatgcctcccgccgtttccagcggacgtcttcatggtcccacagtatggatacctcaccctgaacaacgggagtcaggcggtaggacgctcttccttttactgcctggagtactttccttctcagatgcttcgtactggaaacaactttcagttcagctacacctttgaagacgttcctttccacagcagctacgctcacagccagagtctggatcggctgatgaatcctctgatcgaccagtacctgtattatctgaacaaaacacaatcaaatagtggaactcttcagcagtctcggctactgtttagtcaagctggacccaccagcatgtctcttcaagctaaaaactggctacctggaccttgctacagacagcagcgtctgtcaaagcaggcaaacgacaacaacaacagcaactttccctggactgcggctacaaagtatcacctaaatggccgggactcgttggttaatccaggaccagctatggccagtcacaaagacgatgaagaaaagtttttccccatgcatggaaccctgatatttggtaaacaaggaacaaatgctaacgacgcggatttggacaatgtcatgattacagatgaagaagaaatccgcaccaccaatcccgtggctacggagcagtacggatatgtgtcaaataatttgcaaaactcaaatactggtccaactactggaactgtcaatcaccaaggagcgttacctggcatggtgtggcaggatcgagacgtgtacctgcagggacccatttgggccaagattcctcacaccgatggacactttcatccttctccactgatgggaggttttgggctcaaacacccgcctcctcagatcatgatcaaaaacactcccgttccagccaatcctcccacaaacttcagttctgccaagtttgcttctttcatcacacagtattccacggggcaggtcagcgtggagatcgagtgggagctgcagaaagagaacagcaaacgctggaatcccgaaattcagtacacttccaactacaacaaatctgttaatgtggactttactgtggacactaatggcgtgtattcagagcctcgccccattggcaccagatacctgactcgtaatctgtaa

SEQ ID NO: 320 - DNA, 2211 bp, Adeno-associated virus; identical to SEQ ID NO: 1

SEQ ID NO: 321 - DNA, 2208 bp, Adeno-associated virus
atggctgccgatggttatcttccagattggctcgaggacactctctctgaaggaacaagacagtggtggaagctcaaacctggcccaccaccaccaaagcccgcagagcggcataaggacgacagcaggggtcttgtgcttcctgggtacaagtacctcggacccttcaacggactcgacaagggggagccggtcaacgaggcagacgccgcggccctcgagcacgacaaggcctacgaccggcagctcgacagcggagacaacccgtacctcaagtacaaccacgccgacgcggagtttcaggagcgtcttaaagaagatacgtcttttgggggcaacctcggacgagcagtcttccaggcgaaaaagagggttcttgaacctctgggcctggttgaggaacctgttaagacggctccgggaaaaaagaggccggtagagcactctcctgcggagccagactcctcctcgggaaccggaaaagcgggccagcagcctgcaagaaaaagattgaattttggtcagactggagacgcagactccgtacctgacccccagcctctcggacagccaccagcagccccctctggtttgggatctactacaatggctacaggcagtggcgcaccaatggcagacaataacgagggtgccgatggagtgggtaattcctcaggaaattggcattgcgattcccaatggctgggcgacagagtcatcaccaccagcacccgaacctgggccctgcccacctacaacaaccacctctacaagcaaatctcaagccaatcaggagcctcaaacgacaaccactactttggctacagcaccccttgggggtattttgacttcaacagattccactgccacttttcaccacgtgactggcaaagactcatcaacaacaactggggattccgacccaagagactcaacttcaagctctttaacattcaagtcaaagaggtcacgcagaatgacggtacgacgacgattgccaataaccttaccagcacggttcaggtgtttactgactcggagtaccagctcccgtacgtcctcgggtcggcgcatcaaggatgcctcccgccgtttccagcggacgtcttcatggtcccacagtatggatacctcaccctgaacaacgggagtcaggcggtaggacgctcttccttttactgcctggagtactttccttctcagatgcttcgtactggaaacaactttcagttcagctacacctttgaagacgttcctttccacagcagctacgctcacagccagagtctggatcggctgatgaatcctctgatcgaccagtacctgtattatctgaacaaaacacaatcaaatagtggaactcttcagcagtctcggctactgtttagtcaagctggacccaccagcatgtctcttcaagctaaaaactggctacctggaccttgctacagacagcagcgtctgtcaaagcaggcaaacgacaacaacaacagcaactttccctggactgcggctacaaagtaccacctaaatggccgggactcgttggttaatccaggaccagctatggccagtcacaaagacgatgaagaaaagtttttccccatgcatggaaccctgatatttggtaaacaaggaacaaatgctaacgacgcggatttggacaatgtcatgattacagatgaagaagaaatccgcaccaccaatcccgtggctacggagcagtacggatatgtgtcaaataatttgcaaaactcaaatactggtccaactactggaactgtcaatcaccaaggagcgttacctggcatggtgtggcaggatcgagacgtgtacctgcagggacccatttgggccaagattcctcacaccgatggacactttcatccttctccactgatgggaggttttgggctcaaacacccgcctcctcagatcatgatcaaaaacactcccgttccagccaatcctcccacaaacttcagttctgccaagtttgcttctttcatcacacagtattccacggggcaggtcagcgtggagatcgagtgggagctgcagaaagagaacagcaaacgctggaatcccgaaattcagtacacttccaactacaacaaatctgttaatgtggactttactgtggacactaatggcgtgtattcagagcctcgccccattggcaccagatacctgactcgtaatctgtaa

SEQ ID NO: 322 - DNA, 2217 bp, Adeno-associated virus
atggctgctgacggttatcttccagattggctcgaggacaacctctctgagggcattcgcgagtggtgggacctgaaacctggagcccccaagcccaaggccaaccagcagaagcaggacgacggccggggtctggtgcttcctggctacaagtacctcggacccttcaacggactcgacaagggggagcccgtcaacgcggcggacgcagcggccctcgagcacgacaaggcctacgaccagcagctcaaagcgggtgacaatccgtacctgcggtataaccacgccgacgccgagtttcaggagcgtctgcaagaagatacgtcttttgggggcaacctcgggcgagcagtcttccaggccaagaagcgggttctcgaacctctcggtctggttgaggaagctgctaagacggctcctggaaagaagagaccggtagaaccgtcacctcagcgttcccccgactcctccacgggcatcggcaagaaaggccagcagcccgctaaaaagagactgaactttggtcagactggcgactcagagtcagtccccgaccctcaaccaatcggagaaccacctgcaggcccctctggtctgggatctggtacaatggctgcaggcggtggcgctccaatggcagacaataacgaaggcgccgacggagtgggtagttcctcaggaaattggcattgcgattccacatggctgggcgacagagtcatcaccaccagcacccgaacctgggccctgcccacctacaacaaccacctctacaagcaaatatccaatgggacatcgggagggagcaccaacgacaacacctacttcggctacagcaccccctgggggtattttgacttcaacagattccactgccacttctcaccacgtgactggcagcgactcatcaacaacaactggggattccggccaaaaagactcagcttcaagctcttcaacatccaggtcaaggaggtcacgcagaatgaaggcaccaagaccatcgccaataaccttaccagcacgattcaggtatttacggactcggaataccagctgccgtacgtcctcggctccgcgcaccagggctgcctgcctccgttcccggcggacgtcttcatgattccccagtacggctaccttacactgaacaatggaagtcaagccgtaggccgttcctccttctactgcctggaatattttccatctcaaatgctgcgaactggaaacaattttgaattcagctacaccttcgaggacgtgcctttccacagcagctacgcacacagccagagcttggaccgactgatgaatcctctcatcgaccagtacctgtactacttatccagaactcagtccacaggaggaactcaaggtacccagcaattgttattttctcaagctgggcctgcaaacatgtcggctcaggctaagaactggctacctggaccttgctaccggcagcagcgagtctctacgacactgtcgcaaaacaacaacagcaactttgcttggactggtgccaccaaatatcacctgaacggaagagactctttggtaaatcccggtgtcgccatggcaacccacaaggacgacgaggaacgcttcttcccgtcgagtggagtcctgatgtttggaaaacagggtgctggaagagacaatgtggactacagcagcgttatgctaaccagcgaagaagaaattaaaaccactaaccctgtagccacagaacaatacggtgtggtggctgacaacttgcagcaaaccaatacagggcctattgtgggaaatgtcaacagccaaggagccttacctggcatggtctggcagaaccgagacgtgtacctgcagggtcccatctgggccaagattcctcacacggacggcaactgccacccttcaccgctaatgggaggatttggactgaagcacccacctcctcagatcctgatcaagaacacgccggtacctgcggatcctccaacaacgttcagccaggcgaaattggcttccttcattacgcagtacagcaccggacaggtcagcgtggaaatcgagtgggagctgcagaaggagaacagcaaacgctggaacccagagattcagtacacttcaaactactacaaatctacaaatgtggactttgctgtcaatacagagggaacttattctgagcctcgccccattggtactcgttacctcacccgtaatctgtaa

SEQ ID NO: 323 - protein, 735 aa, Adeno-associated virus
MAADGYLPDWLEDTLSEGTRQWWKLKPGPPPPKPAERHKDDSRGLVLPGYKYLGPFNGLDKGEPVNEADAAALEHDKAYDRQLDSGDNPYLKYNHADAEFQERLKEDTSFGGNLGRAVFQAKKRVLEPLGLVEEPVKTAPGKKRPVEHSPAEPDSSSGTGKAGQQPARKRLNFGQTGDADSVPDPQPLGQPPAAPSGLGSTTMATGSGAPMADNNEGADGVGNSSGNWHCDSQWLGDRVITTSTRTWALPTYNNHLYKQISSQSGASNDNHYFGYSTPWGYFDFNRFHCHFSPRDWQRLINNNWGFRPKRLNFKLFNIQVKEVTQNDGTTTIANNLTSTVQVFTDSEYQLPYVLGSAHQGCLPPFPADVFMVPQYGYLTLNNGSQAVGRSSFYCLEYFPSQMLRTGNNFQFSYTFEDVPFHSSYAHSQSLDRLMNPLIDQYLYYLNKTQSNSGTLQQSRLLFSQAGPTSMSLQAKNWLPGPCYRQQRLSKQANDNNNSNFPWTAATKYHLNGRDSLVNPGPAMASHKDDEEKFFPMHGTLIFGKQGTNANDADLDNVMITDEEEIRTTNPVATEQYGYVSNNLQNSNTGPTTGTVNHQGALPGMVWQDRDVYLQGPIWAKIPHTDGHFHPSPLMGGFGLKHPPPQIMIKNTPVPANPPTNFSSAKFASFITQYSTGQVSVEIEWELQKENSKRWNPEIQYTSNYNKSVNVDFTVDTNGVYSEPRPIGTRYLTRNL

SEQ ID NO: 324 - DNA, 2208 bp, Adeno-associated virus
atggctgccgatggttatcttccagattggctcgaggacactctctctgaaggaataagacagtggtggaagctcaaacctggcccaccaccaccaaagcccgcagagcggcatcaggacaacagcaggggtcttgtgcttcctgggtacaagtacctcggaccctccaacggactcgacaaaggagagccggtcaacgaggcagacgccgcggccctcgagcacgacaaggcctacgaccggcagctcgacagcggagacaacccgtacctcaagtacaaccacgccgacgcggagtttcaggagcgtcttaaagaagatacgtcttttgggggcaacctcggacgagcagtcttccaggcgaaaaagagggttcttgaacctctgggcctggttgaggaacctgttaagacggctccgggaaaaaagaggccggtagagcactctcctgtggagccagactcctcctcgggaaccggaaaagcgggccatcagcctgcgagaaagagattgaattttggtcagactggagacgcagactccgtacctgacccccagcctctcggacagccaccagcagcccccacaagtttgggatctactacaatggctacaggcagtggcgcaccaatggcagacaataacgagggtgccgatggagtgggtaattcctcaggaaattggcattgcgattcccaatggctgggcgacagagtcatcaccaccagcacccgaacctgggccctgcccacctacaacaaccacctctacaagcaaatctccagccaatcaggagcctcgaacgacaaccactactttggctgcagcaccccctgggggtattttgacttcaacagattccactgtcacttctccccacgtgattggcaaagactcatcaacaacaactggggattccgacccaagagactcaacttcaagctctttaacattcaagtcaaagaggtcacgcagaatgacggtacgacgacgattgccaataaccttaccagcacggttcaggtgtttactgactcggagtacccgctcccgtacgtcctcggctcggcgcatcaaggatgcctcccgccgtttccagcggacgtcttcatggtcccacagtatggatacctcaccctgaacaacgggagtcaggcggtaggacgctcttccttttactgcctggagtactttccttctcagatgctgcgtaccggaaacaactttaccttcagctacacctttgaggacgttcctttccacagcagctacgctcacagccagagtttggaccggctgatgaatcctctgatcgaccagtatctatattatctgaacaggacacaatcaaatagtggaactcttcagcagtctaggctactgtttagccaagctggacccaccagcatgtctcttcaagctaaaaactggctgcctggaccttgctacagacagcagcgtctttcaaagcaggcaaacgacaacaacaacagcaactttccctggactgcggctacaaagtatcatctaaatggccgggactcgttggttaatccaggaccagctatggccagccacaaagacgatgaagaaaagtttttccccatgcatggaaccctgatatttggtaaacaaggaacaaatgctaacgacgcggatttggagcatgttatgattacagatgaagaagaaatcaggaccaccaatcctgtggctacagagcagtacggaaacgtgtcaaataatttgcaaaactcaaatactggtccaactacagaaaatgtcaatcaccagggagcgttacctggtatggtgtggcaggatcgagacgtgtacctgcagggacccatttgggccaagattcctcacaccgacggacactttcacccttctccactgatgggaggttttggactcaaacacccgcctcctcaaatcatgatcaaaaacactcccgttccagccaatcctcccacaaacttcagttctgccaagtttgcttctttcatcacacagtattccacgggccaggtcagcgtggagattgagtgggagctgcagaaggagaacagcaaacgctggaaccccgagatccagtatacttccaactacaacaaatctgttaatgtggactttactgtggacactaatggtgtgtattcagagccttgccccattggcaccagatacctgactcgtaatctgtaa

SEQ ID NO: 325 - protein, 735 aa, Adeno-associated virus
MAADGYLPDWLEDTLSEGIRQWWKLKPGPPPPKPAERHQDNSRGLVLPGYKYLGPSNGLDKGEPVNEADAAALEHDKAYDRQLDSGDNPYLKYNHADAEFQERLKEDTSFGGNLGRAVFQAKKRVLEPLGLVEEPVKTAPGKKRPVEHSPVEPDSSSGTGKAGHQPARKRLNFGQTGDADSVPDPQPLGQPPAAPTSLGSTTMATGSGAPMADNNEGADGVGNSSGNWHCDSQWLGDRVITTSTRTWALPTYNNHLYKQISSQSGASNDNHYFGCSTPWGYFDFNRFHCHFSPRDWQRLINNNWGFRPKRLNFKLFNIQVKEVTQNDGTTTIANNLTSTVQVFTDSEYPLPYVLGSAHQGCLPPFPADVFMVPQYGYLTLNNGSQAVGRSSFYCLEYFPSQMLRTGNNFTFSYTFEDVPFHSSYAHSQSLDRLMNPLIDQYLYYLNRTQSNSGTLQQSRLLFSQAGPTSMSLQAKNWLPGPCYRQQRLSKQANDNNNSNFPWTAATKYHLNGRDSLVNPGPAMASHKDDEEKFFPMHGTLIFGKQGTNANDADLEHVMITDEEEIRTTNPVATEQYGNVSNNLQNSNTGPTTENVNHQGALPGMVWQDRDVYLQGPIWAKIPHTDGHFHPSPLMGGFGLKHPPPQIMIKNTPVPANPPTNFSSAKFASFITQYSTGQVSVEIEWELQKENSKRWNPEIQYTSNYNKSVNVDFTVDTNGVYSEPCPIGTRYLTRNL

SEQ ID NO: 326 - DNA, 2214 bp, Artificial Sequence
  Description of Artificial Sequence: Synthetic polynucleotide
atggctgccgatggttatcttccagattggctcgaggacaaccttagtgaaggaattcgcgagtggtgggctttgaaacctggagcccctcaacccaaggcaaatcaacaacatcaagacaacgctcgaggtcttgtgcttccgggttacaaataccttggacccggcaacggactcgacaagggggagccggtcaacgcagcagacgcggcggccctcgagcacgacaaggcctacgaccagcagctgcaggcgggtgacaatccgtacctgcggtataaccacgccgacgccgagtttcaggagcgtctgcaagaagatacgtcttttgggggcaaccttggcagagcagtcttccaggccaaaaagaggatccttgagcctcttggtctggttgaggaagcagctaaaacggctcctggaaagaagaggcctgtagatcagtctcctcaggaaccggactcatcatctggtgttggcaaatcgggcaaacagcctgccagaaaaagactaaatttcggtcagactggcgactcagagtcagtcccagaccctcaacctctcggagaaccaccagcagcccccacaagtttgggatctaatacaatggcttcaggcggtggcgcaccaatggcagacaataacgagggtgccgatggggtgggtagttcctcgggaaattggcattgcgattcccaatggctgggggacagagtcatcaccaccagcacccgaacctgggccctgcccacctacaacaatcacctctacaagcaaatctccaacgggacatcgggaggagccaccaacgacaacacctacttcggctacagcaccccctgggggtattttgactttaacagattccactgccacttttcaccacgtgactggcagcgactcatcaacaacaactggggattccggcccaagagactcagcttcaagctcttcaacatccaggtcaaggaggtcacgcagaatgaaggcaccaagaccatcgccaataacctcaccagcaccatccaggtgtttacggactcggagtaccagctgccgtacgttctcggctctgcgcaccagggctgcctccctccgttcccggcggacgtgttcatgattccgcaatacggctacctgacgctcaacaatggcagccaagccgtgggacgttcatccttttactgcctggaatatttcccttctcagatgctgagaacgggcaacaactttaccttcagctacacctttgaggaagtgcctttccacagcagctacgcgcacagccagagcttggaccggctgatgaatcctctgattgaccagtacctgtactacttgtctcggactcaaacaacaggaggcacggcaaatacgcagactctgggcttcagccaaggtgggcctaatacaatggccaatcaggcaaagaactggctgccaggaccctgttaccgccaacaacgcgtctcaacgacaaccgggcaaaacaacaatagcaactttgcctggactgctgggaccaaataccatctgaatggaagaaattcattggctaatcctggcatcgctatggcaacacacaaagacgacgaggagcgtttttttcccagtaacgggatcctgatttttggcaaacaaaatgctgccagagacaatgcggattacagcgatgtcatgctcaccagcgaggaagaaatcaaaaccactaaccctgtggctacagaggaatacggtatcgtggcagataacttgcagcagcaaaacacggctcctcaaattggaactgtcaacagccagggggccttacccggtatggtctggcagaaccgggacgtgtacctgcagggtcccatctgggccaagattcctcacacggacggcaacttccacccgtctccgctgatgggcggctttggcctgaaacatcctccgcctcagatcctgatcaagaacacgcctgtacctgcggatcctccgaccaccttcaaccagtcaaagctgaactctttcatcacgcaatacagcaccggacaggtcagcgtggagatcgagtgggagctgcagaaggaaaacagcaagcgctggaacccggagatccagtacacttccaactattacaagtctaataatgttgaatttgctgttaatactgaaggtgtatatagtgaaccccgccccattggcaccagatacctgactcgtaatctgtaa

SEQ ID NO: 327 - protein, 737 aa, Artificial Sequence
  Description of Artificial Sequence: Synthetic polypeptide
MAADGYLPDWLEDNLSEGIREWWALKPGAPQPKANQQHQDNARGLVLPGYKYLGPGNGLDKGEPVNAADAAALEHDKAYDQQLQAGDNPYLRYNHADAEFQERLQEDTSFGGNLGRAVFQAKKRILEPLGLVEEAAKTAPGKKRPVDQSPQEPDSSSGVGKSGKQPARKRLNFGQTGDSESVPDPQPLGEPPAAPTSLGSNTMASGGGAPMADNNEGADGVGSSSGNWHCDSQWLGDRVITTSTRTWALPTYNNHLYKQISNGTSGGATNDNTYFGYSTPWGYFDFNRFHCHFSPRDWQRLINNNWGFRPKRLSFKLFNIQVKEVTQNEGTKTIANNLTSTIQVFTDSEYQLPYVLGSAHQGCLPPFPADVFMIPQYGYLTLNNGSQAVGRSSFYCLEYFPSQMLRTGNNFTFSYTFEEVPFHSSYAHSQSLDRLMNPLIDQYLYYLSRTQTTGGTANTQTLGFSQGGPNTMANQAKNWLPGPCYRQQRVSTTTGQNNNSNFAWTAGTKYHLNGRNSLANPGIAMATHKDDEERFFPSNGILIFGKQNAARDNADYSDVMLTSEEEIKTTNPVATEEYGIVADNLQQQNTAPQIGTVNSQGALPGMVWQNRDVYLQGPIWAKIPHTDGNFHPSPLMGGFGLKHPPPQILIKNTPVPADPPTTFNQSKLNSFITQYSTGQVSVEIEWELQKENSKRWNPEIQYTSNYYKSNNVEFAVNTEGVYSEPRPIGTRYLTRNL

SEQ ID NO: 328 - DNA, 2211 bp, Artificial Sequence
  Description of Artificial Sequence: Synthetic polynucleotide
atggctgccgatggttatcttccagattggctcgaggacaacctctctgagggcattcgcgagtggtgggacttgaaacctggagccccgaagcccaaagccaaccagcaaaagcaggacgacggccggggtctggtgcttcctggctacaagtacctcggacccttcaacggactcgacaagggggagcccgtcaacgcggcggacgcagcggccctcgagcacgacaaggcctacgaccagcagctcaaagcgggtgacaatccgtacctgcggtataaccacgccgacgccgagtttcaggagcgtctgcaagaagatacgtcttttgggggcaacctcgggcgagcagtcttccaggccaagaagcgggttctcgaacctctcggtctggttgaggaaggcgctaagacggctcctggaaagaaacgtccggtagagcagtcgccacaagagccagactcctcctcgggcatcggcaagacaggccagcagcccgctaaaaagagactcaattttggtcagactggcgactcagagtcagtccccgacccacaacctctcggagaacctccagcaacccccgctgctgtgggacctactacaatggcttcaggcggtggcgcaccaatggcagacaataacgaaggcgccgacggagtgggtaatgcctcaggaaattggcattgcgattccacatggctgggcgacagagtcatcaccaccagcacccgaacatgggccttgcccacctataacaaccacctctacaagcaaatctccagtgcttcaacgggggccagcaacgacaaccactacttcggctacagcaccccctgggggtattttgatttcaacagattccactgccatttctcaccacgtgactggcagcgactcatcaacaacaattggggattccggcccaagagactcaacttcaagctcttcaacatccaagtcaaggaggtcacgacgaatgatggcgtcacgaccatcgctaataaccttaccagcacggttcaagtcttctcggactcggagtaccagctgccgtacgttctcggctctgcccaccagggctgcctgcctccgttcccggcggacgtgttcatgattccccagtacggctacctaacactcaacaacggtagtcaggccgtgggacgctcctccttctactgcctggaatactttccttcgcagatgctgagaaccggcaacaacttccagtttacttacaccttcgaggacgtgcctttccacagcagctacgcccacagccagagcttggaccggctgatgaatcctctgattgaccagtacctgtactacttgtctcggactcaaacaacaggaggcacggcaaatacgcagactctgggcttcagccaaggtgggcctaatacaatggccaatcaggcaaagaactggctgccaggaccctgttaccgccaacaacgcgtctcaacgacaaccgggcaaaacaacaatagcaattttacctggactggtgcttcaaaatataacctcaatgggcgtgaatccatcatcaaccctggcactgctatggcctcacacaaagacgacgaagacaagttctttcccatgagcggtgtcatgatttttggaaaagagagcgccggagcttcaaacactgcattggacaatgtcatgattacagacgaagaggaaattaaagccactaaccctgtggccaccgaaagatttgggaccgtggcagtcaatttccagagcagcagcacagaccctgcgaccggagatgtgcatgctatgggagcattacctggcatggtgtggcaagatagagacgtgtacctgcagggtcccatttgggccaaaattcctcacacagatggacactttcacccgtctcctcttatgggcggctttggactcaagaacccgcctcctcagatcctcatcaaaaacacgcctgttcctgcgaatcctccggcggagttttcagctacaaagtttgcttcattcatcacccaatactccacaggacaagtgagtgtggaaattgaatgggagctgcagaaagaaaacagcaagcgctggaatcccgaagtgcagtacacatccaattatgcaaaatctgccaacgttgattttactgtggacaacaatggactttatactgagcctcgccccattggcacccgttacctcacccgtcccctgtaa

SEQ ID NO: 329 - protein, 736 aa, Artificial Sequence
  Description of Artificial Sequence: Synthetic polypeptide
MAADGYLPDWLEDNLSEGIREWWDLKPGAPKPKANQQKQDDGRGLVLPGYKYLGPFNGLDKGEPVNAADAAALEHDKAYDQQLKAGDNPYLRYNHADAEFQERLQEDTSFGGNLGRAVFQAKKRVLEPLGLVEEGAKTAPGKKRPVEQSPQEPDSSSGIGKTGQQPAKKRLNFGQTGDSESVPDPQPLGEPPATPAAVGPTTMASGGGAPMADNNEGADGVGNASGNWHCDSTWLGDRVITTSTRTWALPTYNNHLYKQISSASTGASNDNHYFGYSTPWGYFDFNRFHCHFSPRDWQRLINNNWGFRPKRLNFKLFNIQVKEVTTNDGVTTIANNLTSTVQVFSDSEYQLPYVLGSAHQGCLPPFPADVFMIPQYGYLTLNNGSQAVGRSSFYCLEYFPSQMLRTGNNFQFTYTFEDVPFHSSYAHSQSLDRLMNPLIDQYLYYLSRTQTTGGTANTQTLGFSQGGPNTMANQAKNWLPGPCYRQQRVSTTTGQNNNSNFTWTGASKYNLNGRESIINPGTAMASHKDDEDKFFPMSGVMIFGKESAGASNTALDNVMITDEEEIKATNPVATERFGTVAVNFQSSSTDPATGDVHAMGALPGMVWQDRDVYLQGPIWAKIPHTDGHFHPSPLMGGFGLKNPPPQILIKNTPVPANPPAEFSATKFASFITQYSTGQVSVEIEWELQKENSKRWNPEVQYTSNYAKSANVDFTVDNNGLYTEPRPIGTRYLTRPL

SEQ ID NO: 330 - DNA, 2211 bp, Artificial Sequence
  Description of Artificial Sequence: Synthetic polynucleotide
atggctgctgacggttatcttccagattggctcgaggacaacctttctgaaggcattcgagagtggtgggcgctgcaacctggagcccctaaacccaaggcaaatcaacaacatcaggacaacgctcggggtcttgtgcttccgggttacaaatacctcggacccggcaacggactcgacaagggggaacccgtcaacgcagcggacgcggcagccctcgagcacgacaaggcctacgaccagcagctcaaggccggtgacaacccctacctcaagtacaaccacgccgacgccgagttccaggagcggctcaaagaagatacgtcttttgggggcaacctcgggcgagcagtcttccaggccaaaaagaggcttcttgaacctcttggtctggttgaggaagcggctaagacggctcctggaaagaagaggcctgtagatcagtctcctcaggaaccggactcatcatctggtgttggcaaatcgggcaaacagcctgccagaaaaagactaaatttcggtcagactggcgactcagagtcagtcccagaccctcaacctctcggagaaccaccagcagcccccacaagtttgggatctaatacaatggcttcaggcggtggcgcaccaatggcagacaataacgagggtgccgatggagtgggtaattcctcaggaaattggcattgcgattcccaatggctgggcgacagagtcatcaccaccagcaccagaacctgggccctgcccacttacaacaaccatctctacaagcaaatctccagccaatcaggagcttcaaacgacaaccactactttggctacagcaccccttgggggtattttgactttaacagattccactgccacttctcaccacgtgactggcagcgactcattaacaacaactggggattccggcccaagaaactcagcttcaagctcttcaacatccaagttaaagaggtcacgcagaacgatggcacgacgactattgccaataaccttaccagcacggttcaagtgtttacggactcggagtatcagctcccgtacgtgctcgggtcggcgcaccaaggctgtctcccgccgtttccagcggacgtcttcatggtccctcagtatggatacctcaccctgaacaacggaagtcaagcggtgggacgctcatccttttactgcctggagtacttcccttcgcagatgctaaggactggaaataacttccaattcagctataccttcgaggatgtaccttttcacagcagctacgctcacagccagagtttggatcgcttgatgaatcctcttattgatcagtatctgtactacctgaacagaacgcaaggaacaacctctggaacaaccaaccaatcacggctgctttttagccaggctgggcctcagtctatgtctttgcaggccagaaattggctacctgggccctgctaccggcaacagagactttcaaagactgctaacgacaacaacaacagtaactttccttggacagcggccagcaaatatcatctcaatggccgcgactcgctggtgaatccaggaccagctatggccagtcacaaggacgatgaagaaaaatttttccctatgcacggcaatctaatatttggcaaagaagggacaacggcaagtaacgcagaattagataatgtaatgattacggatgaagaagagattcgtaccaccaatcctgtggcaacagagcagtatggaactgtggcaaataacttgcagagctcaaatacagctcccacgactagaactgtcaatgatcagggggccttacctggcatggtgtggcaagatcgtgacgtgtaccttcaaggacctatctgggcaaagattcctcacacggatggacactttcatccttctcctctgatgggaggctttggactgaaacatccgcctcctcaaatcatgatcaaaaatactccggtaccggcaaatcctccgacgactttcagcccggccaagtttgcttcatttatcactcagtactccactggacaggtcagcgtggaaattgagtgggagctacagaaagaaaacagcaaacgttggaatccagagattcagtacacttccaactacaacaagtctgttaatgtggactttactgtagacactaatggtgtttatagtgaacctcgccccattggcacccgttaccttacccgtcccctgtaa

SEQ ID NO: 331 - protein, 736 aa, Artificial Sequence
  Description of Artificial Sequence: Synthetic polypeptide
MAADGYLPDWLEDNLSEGIREWWALQPGAPKPKANQQHQDNARGLVLPGYKYLGPGNGLDKGEPVNAADAAALEHDKAYDQQLKAGDNPYLKYNHADAEFQERLKEDTSFGGNLGRAVFQAKKRLLEPLGLVEEAAKTAPGKKRPVDQSPQEPDSSSGVGKSGKQPARKRLNFGQTGDSESVPDPQPLGEPPAAPTSLGSNTMASGGGAPMADNNEGADGVGNSSGNWHCDSQWLGDRVITTSTRTWALPTYNNHLYKQISSQSGASNDNHYFGYSTPWGYFDFNRFHCHFSPRDWQRLINNNWGFRPKKLSFKLFNIQVKEVTQNDGTTTIANNLTSTVQVFTDSEYQLPYVLGSAHQGCLPPFPADVFMVPQYGYLTLNNGSQAVGRSSFYCLEYFPSQMLRTGNNFQFSYTFEDVPFHSSYAHSQSLDRLMNPLIDQYLYYLNRTQGTTSGTTNQSRLLFSQAGPQSMSLQARNWLPGPCYRQQRLSKTANDNNNSNFPWTAASKYHLNGRDSLVNPGPAMASHKDDEEKFFPMHGNLIFGKEGTTASNAELDNVMITDEEEIRTTNPVATEQYGTVANNLQSSNTAPTTRTVNDQGALPGMVWQDRDVYLQGPIWAKIPHTDGHFHPSPLMGGFGLKHPPPQIMIKNTPVPANPPTTFSPAKFASFITQYSTGQVSVEIEWELQKENSKRWNPEIQYTSNYNKSVNVDFTVDTNGVYSEPRPIGTRYLTRPL

SEQ ID NO: 332 - DNA, 2211 bp, Artificial Sequence
  Description of Artificial Sequence: Synthetic polynucleotide
atggctgccgatggttatcttccagattggctcgaggacaaccttagtgaaggaattcgcgagtggtgggctttgaaacctggagcccctcaacccaaggcaaatcaacaacatcaagacaacgctcgaggtcttgtgcttccgggttacaaataccttggacccggcaacggactcgacaagggggagccggtcaacgcagcagacgcggcggccctcgagcacgacaaggcctacgaccagcagctcaaggccggagacaacccgtacctcaagtacaaccacgccgacgccgagttccaggagcggctcaaagaagatacgtcttttgggggcaacctcgggcgagcagtcttccaggccaaaaagaggcttcttgaacctcttggtctggttgaggaagcggctaagacggctcctggaaagaagagaccggtagagccatcaccccagcgttctccagactcctctacgggcatcggcaagaaaggccaacagcccgctaaaaagagactcaattttggtcagactggcgactcagagtcagtccccgacccacaacctctcggagaacctccagcaacccccgctgctgtgggacctactacaatggcttcaggcggtggcgcaccaatggcagacaataacgagggtgccgatggagtgggtaattcctcaggaaattggcattgcgattcccaatggctgggcgacagagtcatcaccaccagcaccagaacctgggccctgcccacttacaacaaccatctctacaagcaaatctccagccaatcaggagcttcaaacgacaaccactactttggctacagcaccccttgggggtattttgactttaacagattccactgccacttttcaccacgtgactggcaaagactcatcaacaacaactggggattccgacccaagagactcaacttcaagctcttcaacatccaagtcaaggaggtcacgacgaatgatggcgtcacgaccatcgctaataaccttaccagcacggttcaagtcttctcggactcggagtaccagttgccgtacgtcctcggctctgcgcaccagggctgcctccctccgttcccggcggacgtgttcatgattccgcagtacggctacctaacgctcaacaatggcagccaagccgtgggacgttcatccttttactgcctggaatatttcccttctcagatgctgagaacgggcaacaactttaccttcagctacacttttgaggacgttcctttccacagcagctacgctcacagccagagtctggaccgtctcatgaatcctctcatcgaccagtacctgtattacttgagcagaacaaacactccaagtggaaccaccacgcagtcaaggcttcagttttctcaggccggagcgagtgacattcgggaccagtctaggaactggcttcctggaccctgttaccgccagcagcgcgtttctaaaacaaaaacagacaacaacaacagcaattttacctggactggtgcttcaaaatataaccttaatgggcgtgaatctataatcaaccctggcactgctatggcctcacacaaagacgacgaagacaagttctttcccatgagcggtgtcatgatttttggaaaagagagcgccggagcttcaaacactgcattggacaatgtcatgattacagacgaagaggaaattaaagccactaaccctgtggccaccgaaagatttgggaccgtggcagtcaatttccagagcagcagcacagaccctgcgaccggagatgtgcatgttatgggagccttacctggaatggtgtggcaagacagagacgtatacctgcagggtcctatttgggccaaaattcctcacacggatggacactttcacccgtctcctcttatgggcggctttggactcaagaacccgcctcctcagatcctcatcaaaaacacgcctgttcctgcgaatcctccggcggagttttcagctacaaagtttgcttcattcatcacccaatactccacaggacaagtgagtgtggaaattgaatgggagctgcagaaagaaaacagcaagcgctggaatcccgaagtgcagtacacatccaattatgcaaaatctgccaacgttgattttactgtggacaacaatggactttatactgagcctcgccccattggcacccgttaccttacccgtcccctgtaa

SEQ ID NO: 333 - protein, 736 aa, Artificial Sequence
  Description of Artificial Sequence: Synthetic polypeptide
MAADGYLPDWLEDNLSEGIREWWALKPGAPQPKANQQHQDNARGLVLPGYKYLGPGNGLDKGEPVNAADAAALEHDKAYDQQLKAGDNPYLKYNHADAEFQERLKEDTSFGGNLGRAVFQAKKRLLEPLGLVEEAAKTAPGKKRPVEPSPQRSPDSSTGIGKKGQQPAKKRLNFGQTGDSESVPDPQPLGEPPATPAAVGPTTMASGGGAPMADNNEGADGVGNSSGNWHCDSQWLGDRVITTSTRTWALPTYNNHLYKQISSQSGASNDNHYFGYSTPWGYFDFNRFHCHFSPRDWQRLINNNWGFRPKRLNFKLFNIQVKEVTTNDGVTTIANNLTSTVQVFSDSEYQLPYVLGSAHQGCLPPFPADVFMIPQYGYLTLNNGSQAVGRSSFYCLEYFPSQMLRTGNNFTFSYTFEDVPFHSSYAHSQSLDRLMNPLIDQYLYYLSRTNTPSGTTTQSRLQFSQAGASDIRDQSRNWLPGPCYRQQRVSKTKTDNNNSNFTWTGASKYNLNGRESIINPGTAMASHKDDEDKFFPMSGVMIFGKESAGASNTALDNVMITDEEEIKATNPVATERFGTVAVNFQSSSTDPATGDVHVMGALPGMVWQDRDVYLQGPIWAKIPHTDGHFHPSPLMGGFGLKNPPPQILIKNTPVPANPPAEFSATKFASFITQYSTGQVSVEIEWELQKENSKRWNPEVQYTSNYAKSANVDFTVDNNGLYTEPRPIGTRYLTRPL

SEQ ID NO: 334 - DNA, 2211 bp, Artificial Sequence
  Description of Artificial Sequence: Synthetic polynucleotide
atggctgccgatggttatcttccagattggctcgaggacaacctctctgagggcattcgcgagtggtgggacttgaaacctggagcccctaaacccaaggcaaatcaacaacatcaggacaacgctcgaggtcttgtgcttccgggttacaaataccttggacccggcaacggactcgacaagggggagccggtcaacgcagcagacgcggcggccctcgagcacgacaaggcctacgaccagcagctcaaggccggagacaacccgtacctcaagtacaaccacgccgacgccgagttccaggagcggctcaaagaagatacgtcttttgggggcaacctcgggcgagcagtcttccaggccaaaaagaggcttcttgaacctcttggtctggttgaggaagcggctaagacggctcctggaaagaagagaccggtagagccatcaccccagcgttctccagactcctctacgggcatcggcaagaaaggccaacagcccgctaaaaagagactcaattttggtcagactggcgactcagagtcagtccccgacccacaacctctcggagaacctccagcaacccccgctgctgtgggacctactacaatggcttcaggcggtggcgcaccaatggcagacaataacgagggtgccgatggagtgggtaattcctcaggaaattggcattgcgattcccaatggctgggcgacagagtcatcaccaccagcaccagaacctgggccctgcccacttacaacaaccatctctacaagcaaatctccagccaatcaggagcttcaaacgacaaccactactttggctacagcaccccttgggggtattttgactttaacagattccactgccacttttcaccacgtgactggcaaagactcatcaacaacaactggggattccgacccaagagactcaacttcaagctcttcaacatccaagtcaaggaggtcacgacgaatgatggcgtcacgaccatcgctaataaccttaccagcacggttcaagtcttctcggactcggagtaccagttgccgtacgtcctcggctctgcgcaccagggctgcctccctccgttcccggcggacgtgttcatgattccgcagtacggctacctaacgctcaacaatggcagccaagccgtgggacgttcatccttttactgcctggaatatttcccttctcagatgctgagaacgggcaacaactttaccttcagctacacttttgaggacgttcctttccacagcagctacgctcacagccagagtctggaccgtctcatgaatcccctcatcgaccagtacctgtattacttgagcagaacaaacactccaagtggaaccaccacgcagtcaaggcttcagttttctcaggccggagcgagtgacattcgggaccagtctaggaactggcttcctggaccctgttaccggcagcagcgcgtttctaaaacaaaaacagacaacaacaacagcaactttacctggactggtgcttcaaaatataaccttaatgggcgtgaatctataatcaaccctggcactgctatggcctcacacaaagacgacgaagacaagttctttcccatgagcggtgtcatgatttttggaaaggagagcgccggagcttcaaacactgcattggacaatgtcatgatcacagacgaagaggaaatcaaagccactaaccccgtggccaccgaaagatttgggactgtggcagtcaatctccagagcagcagcacagaccctgcgaccggagatgtgcatgttatgggagccttacctggaatggtgtggcaagacagagacgtgtacctgcagggtcctatttgggccaaaattcctcacacggatggacactttcacccgtctcctctcatgggcggctttggacttaagcacccgcctcctcagatcctcatcaaaaacacgcctgttcctgcgaatcctccggcagagttttcggctacaaagtttgcttcattcatcacccagtattccacaggacaagtgagtgtggaaattgaatgggagctgcagaaagaaaacagcaagcgctggaatcccgaagtgcagtacacatccaattatgcaaaatctgccaacgttgattttactgtggacaacaatggactttatactgagcctcgccccattggcacccgttacctcacccgtcccctgtaa

SEQ ID NO: 335 - protein, 736 aa, Artificial Sequence
  Description of Artificial Sequence: Synthetic polypeptide
MAADGYLPDWLEDNLSEGIREWWDLKPGAPKPKANQQHQDNARGLVLPGYKYLGPGNGLDKGEPVNAADAAALEHDKAYDQQLKAGDNPYLKYNHADAEFQERLKEDTSFGGNLGRAVFQAKKRLLEPLGLVEEAAKTAPGKKRPVEPSPQRSPDSSTGIGKKGQQPAKKRLNFGQTGDSESVPDPQPLGEPPATPAAVGPTTMASGGGAPMADNNEGADGVGNSSGNWHCDSQWLGDRVITTSTRTWALPTYNNHLYKQISSQSGASNDNHYFGYSTPWGYFDFNRFHCHFSPRDWQRLINNNWGFRPKRLNFKLFNIQVKEVTTNDGVTTIANNLTSTVQVFSDSEYQLPYVLGSAHQGCLPPFPADVFMIPQYGYLTLNNGSQAVGRSSFYCLEYFPSQMLRTGNNFTFSYTFEDVPFHSSYAHSQSLDRLMNPLIDQYLYYLSRTNTPSGTTTQSRLQFSQAGASDIRDQSRNWLPGPCYRQQRVSKTKTDNNNSNFTWTGASKYNLNGRESIINPGTAMASHKDDEDKFFPMSGVMIFGKESAGASNTALDNVMITDEEEIKATNPVATERFGTVAVNLQSSSTDPATGDVHVMGALPGMVWQDRDVYLQGPIWAKIPHTDGHFHPSPLMGGFGLKHPPPQILIKNTPVPANPPAEFSATKFASFITQYSTGQVSVEIEWELQKENSKRWNPEVQYTSNYAKSANVDFTVDNNGLYTEPRPIGTRYLTRPL

SEQ ID NO: 336 - DNA, 2214 bp, Artificial Sequence
  Description of Artificial Sequence: Synthetic polynucleotide
atggctgccgatggttatcttccagattggctcgaggacaaccttagtgaaggaattcgcgagtggtgggctttgaaacctggagcccctcaacccaaggcaaatcaacaacatcaagacaacgctcgaggtcttgtgcttccgggttacaaataccttggacccggcaacggactcgacaagggggagccggtcaacgcagcagacgcggcggccctcgagcacgacaaggcctacgaccagcagctgcaggcgggtgacaatccgtacctgcggtataaccacgccgacgccgagtttcaggagcgtctgcaagaagatacgtcttttgggggcaaccttggcagagcagtcttccaggccaaaaagaggatccttgagcctcttggtctggttgaggaagcagctaaaacggctcctggaaagaagaggcctgtagatcagtctcctcaggaaccggactcatcatctggtgttggcaaatcgggcaaacagcctgccagaaaaagactaaatttcggtcagactggcgactcagagtcagtcccagaccctcaacctctcggagaaccaccagcagcccccacaagtttgggatctaatacaatggcttcaggcggtggcgcaccaatggcagacaataacgagggtgccgatggggtgggtagttcctcgggaaattggcattgcgattcccaatgactgggggacagagtcatcaccaccagcacccgaacctgggccctgcccacctacaacaatcacctctacaagcaaatctccaacgggacatcgggaggagccaccaacgacaacacctacttcggctacagcaccccctgggggtattttgactttaacagattccactgccacttttcaccacgtgactggcagcgactcatcaacaacaactggggattccggcccaagagactcagcttcaagctcttcaacatccaggtcaaggaggtcacgcagaatgaaggcaccaagaccatcgccaataacctcaccagcaccatccaggtgtttacggactcggagtaccagctgccgtacgttctcggctctgcgcaccagggctgcctccctccgttcccggcggacgtgttcatgattccgcaatacggctacctgacgctcaacaatggcagccaagccgtgggacgttcatccttttactgcctggaatatttcccttctcagatgctgagaacgggcaacaactttaccttcagctacacctttgaggaagtgcctttccacagcagctacgcgcacagccagagcttggaccggctgatgaatcctctgattgaccagtacctgtactacttgtctcggactcaaacaacaggaggcacggcaaatacgcagactctgggcttcagccaaggtgggcctaatacaatggccaatcaggcaaagaactggctgccaggaccctgttaccgccaacaacgcgtctcaacgacaaccgggcaaaacaacaatagcaactttgcctggactgctgggaccaaataccatctgaatggaagaaattcattggctaatcctggcatcgctatggcaacacacaaagacgacgaggagcgtttttttcccagtaacgggatcctgatttttggcaaacaaaatgctgccagagacaatgcggattacagcgatgtcatgctcaccagcgaggaagaaatcaaaaccactaaccctgtggctacagaggaatacggtatcgtggcagataacttgcagcagcaaaacacggctcctcaaattggaactgtcaacagccagggggccttacccggtatggtctggcagaaccgggacgtgtacctgcagggtcccatctgggccaagattcctcacacggacggcaacttccacccgtctccgctgatgggcggctttggcctgaaacatcctccgcctcagatcctgatcaagaacacgcctgtacctgcggatcctccgaccaccttcaaccagtcaaagctgaactctttcatcacgcaatacagcaccggacaggtcagcgtggagatcgagtgggagctgcagaaggaaaacagcaagcgctggaacccggagatccagtacacttccaactattacaagtctaataatgttgaatttgctgttaatactgaaggtgtatatagtgaaccccgccccattggcaccagatacctgactcgtaatctgtaa

SEQ ID NO: 337 - protein, 736 aa, Artificial Sequence
  Description of Artificial Sequence: Synthetic polypeptide
MAADGYLPDWLEDNLSEGIREWWALKPGAPQPKANQQHQDNARGLVLPGYKYLGPGNGLDKGEPVNAADAAALEHDKAYDQQLQAGDNPYLRYNHADAEFQERLQEDTSFGGNLGRAVFQAKKRILEPLGLVEEAAKTAPGKKRPVDQSPQEPDSSSGVGKSGKQPARKRLNFGQTGDSESVPDPQPLGEPPAAPTSLGSNTMASGGGAPMADNNEGADGVGSSSGNWHCDSQLGDRVITTSTRTWALPTYNNHLYKQISNGTSGGATNDNTYFGYSTPWGYFDFNRFHCHFSPRDWQRLINNNWGFRPKRLSFKLFNIQVKEVTQNEGTKTIANNLTSTIQVFTDSEYQLPYVLGSAHQGCLPPFPADVFMIPQYGYLTLNNGSQAVGRSSFYCLEYFPSQMLRTGNNFTFSYTFEEVPFHSSYAHSQSLDRLMNPLIDQYLYYLSRTQTTGGTANTQTLGFSQGGPNTMANQAKNWLPGPCYRQQRVSTTTGQNNNSNFAWTAGTKYHLNGRNSLANPGIAMATHKDDEERFFPSNGILIFGKQNAARDNADYSDVMLTSEEEIKTTNPVATEEYGIVADNLQQQNTAPQIGTVNSQGALPGMVWQNRDVYLQGPIWAKIPHTDGNFHPSPLMGGFGLKHPPPQILIKNTPVPADPPTTFNQSKLNSFITQYSTGQVSVEIEWELQKENSKRWNPEIQYTSNYYKSNNVEFAVNTEGVYSEPRPIGTRYLTRNL

SEQ ID NO: 338 - DNA, 2214 bp, Artificial Sequence
  Description of Artificial Sequence: Synthetic polynucleotide
atggctgccgatggttatcttccagattggctcgaggacaaccttagtgaaggaattcgcgagtggtgggctttgaaacctggagcccctcaacccaaggcaaatcaacaacatcaagacaacgctcgaggtcttgtgcttccgggttacaaataccttggacccggcaacggactcgacaagggggagccggtcaacgcagcagacgcggcggccctcgagcacgacaaggcctacgaccagcagctgcaggcgggtgacaatccgtacctgcggtataaccacgccgacgccgagtttcaggagcgtctgcaagaagatacgtcttttgggggcaaccttggcagagcagtcttccaggccaaaaagaggatccttgagcctcttggtctggttgaggaagcagctaaaacggctcctggaaagaagaggcctgtagatcagtctcctcaggaaccggactcatcatctggtgttggcaaatcgggcaaacagcctgccagaaaaagactaaatttcggtcagactggcgactcagagtcagtcccagaccctcaacctctcggagaaccaccagcagcccccacaagtttgggatctaatacaatggcttcaggcggtggcgcaccaatggcagacaataacgagggtgccgatggggtgggtagttcctcgggaaattggcattgcgattcccaatggctgggggacagagtcatcaccaccagcacccgaacctgggccctgcccacctacaacaatcacctctacaagcaaatctccaacgggacatcgggaggagccaccaacgacaacacctacttcggctacagcaccccctgggggtattttgactttaacagattccactgccacttttcaccacgtgactggcagcgactcatcaacaacaactggggattccggcccaagagactcagcttcaagctcttcaacatccaggtcaaggaggtcacgcagaatgaaggcaccaagaccatcgccaataacctcaccagcaccatccaggtgtttacggactcggagtaccagctgccgtacgttctcggctctgcgcaccagggctgcctccctccgttcccggcggacgtgttcatgattccgcaatacggctacctgacgctcaacaatggcagccaagccgtgggacgttcatccttttactgcctggaatatttcccttctcagatgctgagaacgggcaacaactttaccttcagctacacctttgaggaagtgccttttcacagcagctacgcgcacagccagagcttggaccggctgatgaatcctctgattgaccagtacctgtactacttgtctcggactcaaacaacaggaggcacggcaaatacgcagactctgggcttcagccaaggtgggcctaatacaatggccaatcaggcaaagaactggctgccaggaccctgttaccgccaacaacgcgtctcaacgacaaccgggcaaaacaacaatagcaactttgcctggactgctgggaccaaataccatctgaatggaagaaattcattggctaatcctggcatcgctatggcaacacacaaagacgacgaggagcgtttttttcccagtaacgggatcctgatttttggcaaacaaaatgctgccagagacaatgcggattacagcgatgtcatgctcaccagcgaggaagaaatcaaaaccactaaccctgtggctacagaggaatacggtatcgtggcagataacttgcagcagcaaaacacggctcctcaaattggaactgtcaacagccagggggccttacccggtatggtctggcagaaccgggacgtgtacctgcagggtcccatctgggccaagattcctcacacggacggcaacttccacccgtctccgctgatgggcggctttggcctgaaacatcctccgcctcagatcctgatcaagaacacgcctgtacctgcggatcctccgaccaccttcaaccagtcaaagctgaactctttcatcacgcaatacagcaccggacaggtcagcgtggagatcgagtgggagctgcagaaggaaaacagcaagcgctggaacccggagatccagtacacttccaactattacaagtctaataatgttgaatttgctgttaatactgaaggtgtatatagtgaaccccgccccattggcaccagatacctgactcgtaatctgtaa

SEQ ID NO: 339 - protein, 737 aa, Artificial Sequence; identical to SEQ ID NO: 327
  Description of Artificial Sequence: Synthetic polypeptide

SEQ ID NO: 340 - DNA, 2211 bp, Artificial Sequence
  Description of Artificial Sequence: Synthetic polynucleotide
atggctgccgatggttatcttccagattggctcgaggacaacctctctgagggcattcgcgagtggtgggacttgaaacctggagcccctaaacccaaggcaaatcaacaacatcaggacaacgctcgaggtcttgtgcttccgggttacaaataccttggacccggcaacggactcgacaagggggagccggtcaacgcagcagacgcggcggccctcgagcacgacaaggcctacgaccagcagctcaaggccggagacaacccgtacctcaagtacaaccacgccgacgccgagttccaggagcggctcaaagaagatacgtcttttgggggcaacctcgggcgagcagtcttccaggccaaaaagaggcttcttgaacctcttggtctggttgaggaagcggctaagacggctcctggaaagaagagaccggtagagccatcaccccagcgttctccagactcctctacgggcatcggcaagaaaggccaacagcccgctaaaaagagactcaattttggtcagactggcgactcagagtcagtccccgacccacaacctctcggagaacctccagcaacccccgctgctgtgggacctactacaatggcttcaggcggtggcgcaccaatggcagacaataacgagggtgccgatggagtgggtaattcctcaggaaattggcattgcgattcccaatggctgggcgacagagtcatcaccaccagcaccagaacctgggccctgcccacttacaacaaccatctctacaagcaaatctccagccaatcaggagcttcaaacgacaaccactactttggctacagcaccccttgggggtattttgactttaacagattccactgccacttttcaccacgtgactggcaaagactcatcaacaacaactggggattccgacccaagagactcaacttcaagctcttcaacatccaagtcaaggaggtcacgacgaatgatggcgtcacgaccatcgctaataaccttaccagcacggttcaagtcttctcggactcggagtaccagttgccgtacgtcctcggctctgcgcaccagggctgcctccctccgttcccggcggacgtgttcatgattccgcagtacggctacctaacgctcaacaatggcagccaagccgtgggacgttcatccttttactgcctggaatatttcccttctcagatgctgagaacgggcaacaactttaccttcagctacacttttgaggacgttcctttccacagcagctacgctcacagccagagtctggaccgtctcatgaatcctctcatcgaccagtacctgtattacttgagcagaacaaacactccaagtggaaccaccacgcagtcaaggcttcagttttctcaggccggagcgagtgacattcgggaccagtctaggaactggcttcctggaccctgttaccgccagcagcgcgtttctaaaacaaaaacagacaacaacaacagcaattttacctggactggtgcttcaaaatataaccttaatgggcgtgaatctataatcaaccctggcactgctatggcctcacacaaagacgacgaagacaagttctttcccatgagcggtgtcatgatttttggaaaagagagcgccggagcttcaaacactgcattggacaatgtcatgattacagacgaagaggaaattaaagccactaaccctgtggccaccgaaagatttgggaccgtggcagtcaatttccagagcagcagcacagaccctgcgaccggagatgtgcatgctatgggagcattacctggcatggtgtggcaagatagagacgtgtacctgcagggtcccatttgggccaaaattcctcacacagatggacactttcacccgtctcctcttatgggcggctttggactcaagaacccgcctcctcagatcctcatcaaaaacacgcctgttcctgcgaatcctccggcggagttttcagctacaaagtttgcttcattcatcacccaatactccacaggacaagtgagtgtggaaattgaatgggagctgcagaaagaaaacagcaagcgctggaatcccgaagtgcagtacacatccaattatgcaaaatctgccaacgttgattttactgtggacaacaatggactttatactgagcctcgccccattggcacccgttaccttacccgtcccctgtaa

SEQ ID NO: 341 - protein, 736 aa, Artificial Sequence
  Description of Artificial Sequence: Synthetic polypeptide
MAADGYLPDWLEDNLSEGIREWWDLKPGAPKPKANQQHQDNARGLVLPGYKYLGPGNGLDKGEPVNAADAAALEHDKAYDQQLKAGDNPYLKYNHADAEFQERLKEDTSFGGNLGRAVFQAKKRLLEPLGLVEEAAKTAPGKKRPVEPSPQRSPDSSTGIGKKGQQPAKKRLNFGQTGDSESVPDPQPLGEPPATPAAVGPTTMASGGGAPMADNNEGADGVGNSSGNWHCDSQWLGDRVITTSTRTWALPTYNNHLYKQISSQSGASNDNHYFGYSTPWGYFDFNRFHCHFSPRDWQRLINNNWGFRPKRLNFKLFNIQVKEVTTNDGVTTIANNLTSTVQVFSDSEYQLPYVLGSAHQGCLPPFPADVFMIPQYGYLTLNNGSQAVGRSSFYCLEYFPSQMLRTGNNFTFSYTFEDVPFHSSYAHSQSLDRLMNPLIDQYLYYLSRTNTPSGTTTQSRLQFSQAGASDIRDQSRNWLPGPCYRQQRVSKTKTDNNNSNFTWTGASKYNLNGRESIINPGTAMASHKDDEDKFFPMSGVMIFGKESAGASNTALDNVMITDEEEIKATNPVATERFGTVAVNFQSSSTDPATGDVHAMGALPGMVWQDRDVYLQGPIWAKIPHTDGHFHPSPLMGGFGLKNPPPQILIKNTPVPANPPAEFSATKFASFITQYSTGQVSVEIEWELQKENSKRWNPEVQYTSNYAKSANVDFTVDNNGLYTEPRPIGTRYLTRPL

SEQ ID NO: 342 - DNA, 2211 bp, Artificial Sequence
  Description of Artificial Sequence: Synthetic polynucleotide
atggctgccgatggttatcttccagattggctcgaggacaaccttagtgaaggaattcgcgagtggtgggcgctgaaacctggagccccgaagcccaaagccaaccagcaaaagcaggacgacggccggggtctggtgcttccgggttacaaatacctcggacccggtaacggactcgacaaaggagagccggtcaacgaggcggacgcggcagccctcgagcacgacaaggcctacgaccagcagctcaaagcgggtgacaatccgtacctgcggtataaccacgccgacgccgagtttcaggagcgtctgcaagaagatacgtcttttgggggcaacctcgggcgagcagtcttccaggccaagaagcgggttctcgaacctctcggtctggttgaggaaggcgctaagacggctcccggaaagaaacgtccggtagagcagtcgccacaagagccagactcctctacgggcatcggcaagaaaggccaacagcccgccagaaaaagactcaatttcggtcagactggcgactcagagtcagttccagaccctcaacctctcggagaacctccagcagcgccctctggtgtgggacctactacaatggcttcaggcggtggcgcaccaatggcagacaataacgaaggcgccgacggagtgggtaatgcctcaggaaattggcattgcgattccacatggctgggcgacagagtcatcaccaccagcacccgaacatgggccttgcccacctataacaaccacctctacaagcaaatctccagtgcttcaacgggggccagcaacgacaacacctacttcggctacagcaccccctgggggtattttgatttcaacagattccactgccatttctcaccacgtgactggcagcgactcatcaacaacaattggggattccggcccaagagactcaacttcaaactcttcaacatccaagtcaaggaggtcacgacgaatgatggcgtcacgaccatcgctaataaccttaccagcacggttcaagtcttctcggactcggagtaccagttgccgtacgtcctcggctctgcgcaccagggctgcctccctccgttcccggcggacgtgttcatgattccgcagtacggctacctaacgctcaacaatggcagccaggcagtgggacggtcatccttttactgcctggaatatttcccatcgcagatgctgagaacgggcaataactttaccttcagctacaccttcgaggacgtgcctttccacagcagctacgcgcacagccagagcctggaccggctgatgaatcctctcatcgaccagtacctgtattacctgaacagaactcagaatcagtccggaagtgcccaaaacaaggacttgctgtttagccgggggtctccagctggcatgtctgttcagcccaaaaactggctacctggaccctgttatcggcagcagcgcgtttctaaaacaaaaacagacaacaacaacagcaattttacctggactggtgcttcaaaatataacctcaatgggcgtgaatccatcatcaaccctggcactgctatggcctcacacaaagacgacgaagacaagttctttcccatgagcggtgtcatgatttttggaaaagagagcgccggagcttcaaacactgcattggacaatgtcatgattacagacgaagaggaaattaaagccactaaccctgtggccaccgaaagatttgggaccgtggcagtcaatttccagagcagcagcacagaccctgcgaccggagatgtgcatgttatgggagccttacctggaatggtgtggcaagacagagacgtatacctgcagggtcctatttgggccaaaattcctcacacagatggacactttcacccgtctcctcttatgggcggctttggactcaagaacccgcctcctcagatcctcatcaaaaacacgcctgttcctgcgaatcctccggcagagttttcggctacaaagtttgcttcattcatcacccagtattccacaggacaagtgagcgtggagattgaatgggagctgcagaaagaaaacagcaaacgctggaatcccgaagtgcagtatacatctaactatgcaaaatctgccaacgttgatttcactgtggacaacaatggactttatactgagcctcgccccattggcacccgttacctcacccgtcccctgtaa

SEQ ID NO: 343 - protein, 736 aa, Artificial Sequence
  Description of Artificial Sequence: Synthetic polypeptide
MAADGYLPDWLEDNLSEGIREWWALKPGAPKPKANQQKQDDGRGLVLPGYKYLGPGNGLDKGEPVNEADAAALEHDKAYDQQLKAGDNPYLRYNHADAEFQERLQEDTSFGGNLGRAVFQAKKRVLEPLGLVEEGAKTAPGKKRPVEQSPQEPDSSTGIGKKGQQPARKRLNFGQTGDSESVPDPQPLGEPPAAPSGVGPTTMASGGGAPMADNNEGADGVGNASGNWHCDSTWLGDRVITTSTRTWALPTYNNHLYKQISSASTGASNDNTYFGYSTPWGYFDFNRFHCHFSPRDWQRLINNNWGFRPKRLNFKLFNIQVKEVTTNDGVTTIANNLTSTVQVFSDSEYQLPYVLGSAHQGCLPPFPADVFMIPQYGYLTLNNGSQAVGRSSFYCLEYFPSQMLRTGNNFTFSYTFEDVPFHSSYAHSQSLDRLMNPLIDQYLYYLNRTQNQSGSAQNKDLLFSRGSPAGMSVQPKNWLPGPCYRQQRVSKTKTDNNNSNFTWTGASKYNLNGRESIINPGTAMASHKDDEDKFFPMSGVMIFGKESAGASNTALDNVMITDEEEIKATNPVATERFGTVAVNFQSSSTDPATGDVHVMGALPGMVWQDRDVYLQGPIWAKIPHTDGHFHPSPLMGGFGLKNPPPQILIKNTPVPANPPAEFSATKFASFITQYSTGQVSVEIEWELQKENSKRWNPEVQYTSNYAKSANVDFTVDNNGLYTEPRPIGTRYLTRPL

SEQ ID NO: 344 - DNA, 2205 bp, Artificial Sequence
  Description of Artificial Sequence: Synthetic polynucleotide
atggctgctgacggttatcttccagattggctcgaggacaacctttctgaaggcattcgtgagtggtgggctctgaaacctggagtccctcaacccaaagcgaaccaacaacaccaggacaaccgtcggggtcttgtgcttccgggttacaaatacctcggacccggtaacggactcgacaaaggagagccggtcaacgaggcggacgcggcagccctcgaacacgacaaggcctacgaccagcagctcaaggccggagacaacccgtacctcaagtacaaccacgccgacgccgagttccaggagcggctcaaagaagatacgtcttttgggggcaacctcgggcgagcagtcttccaggccaaaaagaggcttcttgaacctcttggtctggttgaggaagcggctaagacggctcctggaaagaagaggcctgtagagcagtctcctcaggaaccggactcctccgcgggtattggcaaatcgggtgcacagcccgctaaaaagagactcaatttcggtcagactggcgacacagagtcagtcccagaccctcaaccaatcggagaacctcccgcagccccctcaggtgtgggatctcttacaatggcttcaggtggtggcgcaccagtggcagacaataacgaaggtgccgatggagtgggtagttcctcgggaaattggcattgcgattcccaatggctgggggacagagtcatcaccaccagcacccgaacctgggccctgcccacctacaacaaccacctctacaaacaaatttccagccaatcaggagcctcgaacgacaatcactactttggctacagcaccccttgggggtattttgacttcaacagattccactgccacttttcaccacgtgactggcagcgactcatcaacaacaactggggattccggcccaagagactcagcttcaagctcttcaacatccaggtcaaagaggttacggacaacaatggagtcaagaccatcgccaataaccttaccagcacggtccaggtcttcacggactcagactatcagctcccgtacgtgctcgggtcggctcacgagggctgcctcccgccgttcccagcggacgttttcatgattcctcagtacgggtatctgacgcttaatgatggaagccaggccgtgggtcgttcgtccttttactgcctggaatatttcccgtcgcaaatgctaagaacgggtaacaacttccagttcagctacgagtttgagaacgtacctttccatagcagctacgctcacagccaaagcctggaccgactaatgaatccactcatcgaccaatacttgtactatctctcaaagactattaacggttctggacagaatcaacaaacgctaaaattcagtgtggccggacccagcaacatggctgtccagggaagaaactacatacctggacccagctaccgacaacaacgtgtctcaaccactgtgactcaaaacaacaacagcgaatttgcttggcctggagcttcttcttgggctctcaatggacgtaatagcttgatgaatcctggacctgctatggccagccacaaagaaggagaggaccgtttctttcctttgtctggatctttaatttttggcaaacaaggaactggaagagacaacgtggatgcggacaaagtcatgataaccaacgaagaagaaattaaaactactaacccggtagcaacggagtcctatggacaagtggccacaaaccaccagagtgcccaagcacaggcgcagaccggctgggttcaaaaccaaggaatacttccgggtatggtttggcaggacagagatgtgtacctgcaaggacccatctgggccaagattcctcacacggacggcaacttccacccgtctccgctgatgggcggctttggcctgaaacatcctccgcctcagatcctgatcaagaacacgcctgtacctgcggatcctccgaccaccttcaaccagtcaaagctgaactctttcatcacgcaatacagcaccggacaggtcagcgtggaaattgaatgggagctgcagaaggaaaacagcaagcgctggaatcccgaagtgcagtatacatctaactatgcaaaatctgccaacgttgatttcactgtggacaacaatggactttatactgagcctcgccccattggcacccgttacctcacccgtcccctgtaa

SEQ ID NO: 345 - protein, 734 aa, Artificial Sequence
  Description of Artificial Sequence: Synthetic polypeptide
MAADGYLPDWLEDNLSEGIREWWALKPGVPQPKANQQHQDNRRGLVLPGYKYLGPGNGLDKGEPVNEADAAALEHDKAYDQQLKAGDNPYLKYNHADAEFQERLKEDTSFGGNLGRAVFQAKKRLLEPLGLVEEAAKTAPGKKRPVEQSPQEPDSSAGIGKSGAQPAKKRLNFGQTGDTESVPDPQPIGEPPAAPSGVGSLTMASGGGAPVADNNEGADGVGSSSGNWHCDSQWLGDRVITTSTRTWALPTYNNHLYKQISSQSGASNDNHYFGYSTPWGYFDFNRFHCHFSPRDWQRLINNNWGFRPKRLSFKLFNIQVKEVTDNNGVKTIANNLTSTVQVFTDSDYQLPYVLGSAHEGCLPPFPADVFMIPQYGYLTLNDGSQAVGRSSFYCLEYFPSQMLRTGNNFQFSYEFENVPFHSSYAHSQSLDRLMNPLIDQYLYYLSKTINGSGQNQQTLKFSVAGPSNMAVQGRNYIPGPSYRQQRVSTTVTQNNNSEFAWPGASSWALNGRNSLMNPGPAMASHKEGEDRFFPLSGSLIFGKQGTGRDNVDADKVMITNEEEIKTTNPVATESYGQVATNHQSAQAQAQTGWVQNQGILPGMVWQDRDVYLQGPIWAKIPHTDGNFHPSPLMGGFGLKHPPPQILIKNTPVPADPPTTFNQSKLNSFITQYSTGQVSVEIEWELQKENSKRWNPEVQYTSNYAKSANVDFTVDNNGLYTEPRPIGTRYLTRPL

SEQ ID NO: 346 - DNA, 2211 bp, Artificial Sequence
  Description of Artificial Sequence: Synthetic polynucleotide
atggctgccgatggttatcttccagattggctcgaggacaacctctctgagggcattcgcgagtggtgggcgctgaaacctggagccccgaagcccaaagccaaccagcaaaagcaggacgacggccggggtctggtgcttcctggctacaagtacctcggacccttcaacggactcgacaagggggagcccgtcaacgcggcggacgcagcggccctcgagcacgacaaggcctacgaccagcagctgcaggcgggtgacaatccgtacctgcggtataaccacgccgacgccgagtttcaggagcgtctgcaagaagatacgtcttttgggggcaacctcgggcgagcagtcttccaggccaagaagtgggttctcgaacctctcggtctggttgaggaaggcgctaagacggctcctggaaagaaacgtccggtagagcagtcgccacaagagccagactcctcctcgggcatcggcaagacaggccagcagcccgctaaaaagagactcaattttggtcagactggcgactcagagtcagtccccgacccacaacctctcggagaacctccagcaacccccgctgctgtgggacctactacaatggcttcaggcggtggcgcaccaatggcagacaataacgaaggcgccgacggagtgggtaatgcctcaggaaattggcattgcgattccacatggctgggcgacagagtcatcaccaccagcacccgcacctgggccttgcccacctacaataaccacctctacaagcaaatctccagtgcttcaacgggggccagcaacgacaaccactacttcggctacagcaccccctgggggtattttgatttcaacagattccactgccatttctcaccacgtgactggcagcgactcatcaacaacaattggggattccggcccaagagactcaacttcaagctcttcaacatccaagtcaaggaggtcacgacgaatgatggcgtcacaaccatcgctaataaccttaccagcacggttcaagtcttctcggactcggagtaccagcttccgtacgtcctcggctctgcgcaccagggctgcctccctccgttcccggcggacgtgttcatgattccgcaatacggctacctgacgctcaacaatggcagccaagccgtgggacgttcatccttttactgcctggaatatttcccttctcagatgctgagaacgggcaacaactttaccttcagctacacctttgaggaagtgcctttccacagcagctacgcgcacagccagagcctggaccggctgatgaatcctctcatcgaccaatacctgtattacctgaacagaactcaaaatcagtccggaagtgcccaaaacaaggacttgctgtttagccgtgggtctccagctggcatgtctgttcagcccaaaaactggctacctggaccctgttatcggcagcagcgcgtttctaaaacaaaaacagacaacaacaacagcaattttacctggactggtgcttcaaaatataacctcaatgggcgtgaatccatcatcaaccctggcactgctatggcctcacacaaagacgacgaagacaagttctttcccatgagcggtgtcatgatttttggaaaggagagcgccggagcttcaaacactgcattggacaatgtcatgatcaccgacgaagaggaaatcaaagccactaaccccgtggccaccgaaagatttgggactgtggcagtcaatctccagagcagcagcacagaccctgcgaccggagatgtgcatgttatgggagccttacctggcatggtgtggcaagatagagacgtgtacctgcagggtcccatttgggccaaaattcctcacacagatggacactttcacccgtctcctcttatgggcggctttggactcaagaacccgcctcctcagatcctcatcaaaaacacgcctgttcctgcgaatcctccggcggagttttcagctacaaagtttgcttcattcatcacccaatactccacaggacaagtgagtgtggaaattgaatgggagctgcagaaagaaaacagcaagcgctggaatcccgaagtgcagtacacatccaattatgcaaaatctgccaacgttgattttactgtggacaacaatggactttatactgagcctcgccccattggcacccgttacctcacccgtcccctgtaa

SEQ ID NO: 347 - protein, 736 aa, Artificial Sequence
  Description of Artificial Sequence: Synthetic polypeptide
MAADGYLPDWLEDNLSEGIREWWALKPGAPKPKANQQKQDDGRGLVLPGYKYLGPFNGLDKGEPVNAADAAALEHDKAYDQQLQAGDNPYLRYNHADAEFQERLQEDTSFGGNLGRAVFQAKKWVLEPLGLVEEGAKTAPGKKRPVEQSPQEPDSSSGIGKTGQQPAKKRLNFGQTGDSESVPDPQPLGEPPATPAAVGPTTMASGGGAPMADNNEGADGVGNASGNWHCDSTWLGDRVITTSTRTWALPTYNNHLYKQISSASTGASNDNHYFGYSTPWGYFDFNRFHCHFSPRDWQRLINNNWGFRPKRLNFKLFNIQVKEVTTNDGVTTIANNLTSTVQVFSDSEYQLPYVLGSAHQGCLPPFPADVFMIPQYGYLTLNNGSQAVGRSSFYCLEYFPSQMLRTGNNFTFSYTFEEVPFHSSYAHSQSLDRLMNPLIDQYLYYLNRTQNQSGSAQNKDLLFSRGSPAGMSVQPKNWLPGPCYRQQRVSKTKTDNNNSNFTWTGASKYNLNGRESIINPGTAMASHKDDEDKFFPMSGVMIFGKESAGASNTALDNVMITDEEEIKATNPVATERFGTVAVNLQSSSTDPATGDVHVMGALPGMVWQDRDVYLQGPIWAKIPHTDGHFHPSPLMGGFGLKNPPPQILIKNTPVPANPPAEFSATKFASFITQYSTGQVSVEIEWELQKENSKRWNPEVQYTSNYAKSANVDFTVDNNGLYTEPRPIGTRYLTRPL

SEQ ID NO: 348 - DNA, 2214 bp, Artificial Sequence
  Description of Artificial Sequence: Synthetic polynucleotide
atggctgccgatggttatcttccagattggctcgaggacaaccttagtgaaggaattcgcgagtggtgggctttgaaacctggagcccctcaacccaaggcaaatcaacaacatcaagacaacgctcgaggtcttgtgcttccgggttacaaataccttggacccggcaacggactcgacaagggggagccggtcaacgcagcagacgcggcggccctcgagcacgacaaggcctacgaccagcagctgcaggcgggtgacaatccgtacctgcggtataaccacgccgacgccgagtttcaggagcgtctgcaagaagatacgtcttttgggggcaaccttggcagagcagtcttccaggccaaaaagaggatccttgagcctcttggtctggttgaggaagcagctaaaacggctcctggaaagaagaggcctgtagatcagtctcctcaggaaccggactcatcatctggtgttggcaaatcgggcaaacagcctgccagaaaaagactaaatttcggtcagactggcgactcagagtcagtcccagaccctcaacctctcggagaaccaccagcagcccccacaagtttgggatctaatacaatggcttcaggcggtggcgcaccaatggcagacaataacgagggtgccgatggggtgggtagttcctcgggaaattggcattgcgattcccaatggctgggggacagagtcatcaccaccagcacccgaacctgggccctgcccacctacaacaatcacctctacaagcaaatctccaacgggacatcgggaggagccaccaacgacaacacctacttcggctacagcaccccctgggggtattttgactttaacagattccactgccacttttcaccacgtgactggcagcgactcatcaacaacaactggggattccggcccaagagactcagcttcaagctcttcaacatccaggtcaaggaggtcacgcagaatgaaggcaccaagaccatcgccaataacctcaccagcaccatccaggtgtttacggactcggagtaccagctgccgtacgttctcggctcggcgcaccagggctgcctccctccgttcccggcggacgtcttcatggtgccacagtatggatacctgacgctcaacaatggcagccaagccgtgggacgttcatccttttactgcctggaatatttcccttctcagatgctgagaacgggcaacaactttaccttcagctacacctttgaggaagtgcctttccacagcagctacgcgcacagccagagcttggaccggctgatgaatcctctgattgaccagtacctgtactacttgtctcggactcaaacaacaggaggcacggcaaatacgcagactctgggcttcagccaaggtgggcctaatacaatggccaatcaggcaaagaactggctgccaggaccctgttaccgccaacaacgcgtctcaacgacaaccgggcaaaacaacaatagcaactttgcctggactgctgggaccaaataccatctgaatggaagaaattcattggctaatcctggcatcgctatggcaacacacaaagacgacgaggagcgtttttttcccagtaacgggatcctgatttttggcaaacaaaatgctgccagagacaatgcggattacagcgatgtcatgctcaccagcgaggaagaaatcaaaaccactaaccctgtggctacagaggaatacggtatcgtggcagataacttgcagcagcaaaacacggctcctcaaattggaactgtcaacagccagggggacttacccggtatggtctggcagaaccgggacgtgtacctgcagggtcccatctgggccaagattcctcacacggacggcaacttccacccgtctccgctgatgggcggctttggcctgaaacatcctccgcctcagatcctgatcaagaacacgcctgtacctgcggatcctccgaccaccttcaaccagtcaaagctgaactctttcatcacgcaatacagcaccggacaggtcagcgtggagatcgagtgggagctgcagaaggaaaacagcaagcgctggaacccggagatccagtacacttccaactattacaagtctaataatgttgaatttgctgttaatactgaaggtgtatatagtgaaccccgccccattggcaccagatacctgactcgtaatctgtaa

SEQ ID NO: 349 - protein, 737 aa, Artificial Sequence
  Description of Artificial Sequence: Synthetic polypeptide
MAADGYLPDWLEDNLSEGIREWWALKPGAPQPKANQQHQDNARGLVLPGYKYLGPGNGLDKGEPVNAADAAALEHDKAYDQQLQAGDNPYLRYNHADAEFQERLQEDTSFGGNLGRAVFQAKKRILEPLGLVEEAAKTAPGKKRPVDQSPQEPDSSSGVGKSGKQPARKRLNFGQTGDSESVPDPQPLGEPPAAPTSLGSNTMASGGGAPMADNNEGADGVGSSSGNWHCDSQWLGDRVITTSTRTWALPTYNNHLYKQISNGTSGGATNDNTYFGYSTPWGYFDFNRFHCHFSPRDWQRLINNNWGFRPKRLSFKLFNIQVKEVTQNEGTKTIANNLTSTIQVFTDSEYQLPYVLGSAHQGCLPPFPADVFMVPQYGYLTLNNGSQAVGRSSFYCLEYFPSQMLRTGNNFTFSYTFEEVPFHSSYAHSQSLDRLMNPLIDQYLYYLSRTQTTGGTANTQTLGFSQGGPNTMANQAKNWLPGPCYRQQRVSTTTGQNNNSNFAWTAGTKYHLNGRNSLANPGIAMATHKDDEERFFPSNGILIFGKQNAARDNADYSDVMLTSEEEIKTTNPVATEEYGIVADNLQQQNTAPQIGTVNSQGDLPGMVWQNRDVYLQGPIWAKIPHTDGNFHPSPLMGGFGLKHPPPQILIKNTPVPADPPTTFNQSKLNSFITQYSTGQVSVEIEWELQKENSKRWNPEIQYTSNYYKSNNVEFAVNTEGVYSEPRPIGTRYLTRNL

SEQ ID NO: 350 - DNA, 2205 bp, Artificial Sequence
  Description of Artificial Sequence: Synthetic polynucleotide
atggctgctgacggttatcttccagattggctcgaggacaacctttctgaaggcattcgtgagtggtgggctctgaaacctggagtccctcaacccaaagcgaaccaacaacaccaggacaactgtcggggtcttgtgcttccgggttacaaatacctcggacccggtaacggactcgacaaaggagagccggtcaacgaggcggacgcggcagccctcgaacacgacaaggcctacgaccagcagctcaaggccggagacaacccgtacctcaagtacaaccacgccgacgccgagttccaggagcggctcaaagaagatacgtcttttgggggcaacctcgggcgagcagtcttccagaccaaaaagaggcttcttgaacctcttggtctggttgaggaagcggctaagacggctcctggaaagaagaggcctgtagagcagtctcctcaggaaccggactcctccgcgggtattggcaaatcgggtgcacagcccgctaaaaagagactcaatttcggtcagactggcgacacagagtcagtcccagaccctcaaccaatcggagaacctcccgcagccccctcaggtgtgggatctcttacaatggcttcaggtggtggcgcaccagtggcagacaataacgaaggtgccgatggagtgggtagttcctcgggaaattggcattgcgattcccaatggctgggggacagagtcatcaccaccagcacccgaacctgggccctgcccacctacaacaaccacctctacaaacaaatttccagccaatcaggagcctcgaacgacaatcactactttggctacagcaccccttgggggtattttgacttcaacagattccactgccacttttcaccacgtgactggcagcgactcatcaacaacaactggggattccggcccaagagactcagcttcaagctcttcaacatccaggtcaaagaggttacggacaacaatggagtcaagaccatcgccaataaccttaccagcacggtccaggtcttcacggactcagactatcagctcccgtacgtgctcgggtcggctcacgagggctgcctcccgccgttcccagcggacgttttcatgattcctcagtacgggtatctgacgcttaatgatggaagccaggccgtgggtcgttcgtccttttactgcctggaatatttcccgtcgcaaatgctaagaacgggtaacaacttccagttcagctacgagtttgagaacgtacctttccatagcagctacgctcacagccaaagcctggaccgactaatgaatccactcatcgaccaatacttgtactatctctcaaagactattaacggttctggacagaatcaacaaacgctaaaattcagtgtggccggacccagcaacatggctgtccagggaagaaactacatacctggacccagctaccgacaacaacgtgtctcaaccactgtgactcaaaacaacaacagcgaatttgcttggcctggagcttcttcttgggctctcaatggacgtaatagcttgatgaatcctggacctgctatggccagccacaaagaaggagaggaccgtttctttcctttgtctggatctttaatttttggcaaacaaggaactggaagagacaacgtggatgcggacaaagtcatgataaccaacgaagaagaaattaaaactactaacccggtagcaacggagtcctatggacaagtggccacaaaccaccagagtgcccaagcacaggcgcagaccggctgggttcaaaaccaaggaatacttccgggtatggtttggcaggacagagatgtgtacctgcaaggacccatctgggccaagattcctcacacggacggcaacttccacccgtctccgctgatgggcggctttggcctgaaacatcctccgcctcagatcctgatcaagaacacgcctgttcctgcgaatcctccggcggagttttcagctacaaagtttgcttcattcatcacccagtactccacaggacaagtgagtgtggaaattgaatgggagctgcagaaagaaaacagcaagcgctggaatcccgaagtgcagtacacatccaattatgcaaaatctgccaacgttgattttactgtggacaacaatggactttatactgagcctcgccccattggcacccgttaccttaccaaacctctgtaa

SEQ ID NO: 351 - protein, 734 aa, Artificial Sequence
  Description of Artificial Sequence: Synthetic polypeptide
MAADGYLPDWLEDNLSEGIREWWALKPGVPQPKANQQHQDNCRGLVLPGYKYLGPGNGLDKGEPVNEADAAALEHDKAYDQQLKAGDNPYLKYNHADAEFQERLKEDTSFGGNLGRAVFQTKKRLLEPLGLVEEAAKTAPGKKRPVEQSPQEPDSSAGIGKSGAQPAKKRLNFGQTGDTESVPDPQPIGEPPAAPSGVGSLTMASGGGAPVADNNEGADGVGSSSGNWHCDSQWLGDRVITTSTRTWALPTYNNHLYKQISSQSGASNDNHYFGYSTPWGYFDFNRFHCHFSPRDWQRLINNNWGFRPKRLSFKLFNIQVKEVTDNNGVKTIANNLTSTVQVFTDSDYQLPYVLGSAHEGCLPPFPADVFMIPQYGYLTLNDGSQAVGRSSFYCLEYFPSQMLRTGNNFQFSYEFENVPFHSSYAHSQSLDRLMNPLIDQYLYYLSKTINGSGQNQQTLKFSVAGPSNMAVQGRNYIPGPSYRQQRVSTTVTQNNNSEFAWPGASSWALNGRNSLMNPGPAMASHKEGEDRFFPLSGSLIFGKQGTGRDNVDADKVMITNEEEIKTTNPVATESYGQVATNHQSAQAQAQTGWVQNQGILPGMVWQDRDVYLQGPIWAKIPHTDGNFHPSPLMGGFGLKHPPPQILIKNTPVPANPPAEFSATKFASFITQYSTGQVSVEIEWELQKENSKRWNPEVQYTSNYAKSANVDFTVDNNGLYTEPRPIGTRYLTKPL

SEQ ID NO: 352 - DNA, 2211 bp, Artificial Sequence
  Description of Artificial Sequence: Synthetic polynucleotide
atggctgccgatggttatcttccagattggctcgaggacaacctctctgagggcattcgcgagtggtgggacttgaaacctggagcccctaaacccaaggcaaatcaacaacatcaggacaacgctcgaggtcttgtgcttccgggttacaaataccttggacccggcaacggactcgacaagggggagccggtcaacgcagcagacgcggcggccctcgagcacgacaaggcctacgaccagcagctcaaggccggagacaacccgtacctcaagtacaaccacgccgacgccgagttccaggagcggctcaaagaagatacgtcttttgggggcaacctcgggcgagcagtcttccaggccaaaaagaggcttcttgaacctcttggtctggttgaggaagcggctaagacggctcctggaaagaagagaccggtagagccatcaccccagcgttctccagactcctctacgggcatcggcaagaaaggccaacagcccgctaaaaagagactcaattttggtcagactggcgactcagagtcagtccccgacccacaacctctcggagaacctccagcaacccccgctgctgtgggacctactacaatggcttcaggcggtggcgcaccaatggcagacaataacgagggtgccgatggagtgggtaattcctcaggaaattggcattgcgattcccaatggctgggcgacagagtcatcaccaccagcaccagaacctgggccctgcccacttacaacaaccatctctacaagcaaatctccagccaatcaggagcttcaaacgacaaccactactttggctacagcaccccttgggggtattttgactttaacagattccactgccacttttcaccacgtgactggcaaagactcatcaacaacaactggggattccgacccaagagactcaacttcaagctcttcaacatccaagtcaaggaggtcacgacgaatgatggcgtcacgaccatcgctaataaccttaccagcacggttcaagtcttctcggactcggagtaccagttgccgtacgtcctcggctctgcgcaccagggctgcctccctccgttcccggcggacgtgttcatgattccgcagtacggctacctaacgctcaacaatggcagccaagccgtgggacgttcatccttttactgcctggaatatttcccttctcagatgctgagaacgggcaacaactttaccttcagctacacttttgaggacgttcctttccacagcagctacgctcacagccagagtctggaccgtctcatgaatcctctcatcgaccagtacctgtattacttgagcagaacaaacactccaagtggaaccaccacgcagtcaaggcttcagttttctcaggccggagcgagtgacattcgggaccagtctaggaactggcttcctggaccctgttaccgccagcagcgcgtttctaaaacaaaaacagacaacaacaacagcaattttacctggactggtgcttcaaaatataaccttaatgggcgtgaatctataatcaaccctggcactgctatggcctcacacaaagacgacgaagacaagttctttcccatgagcggtgtcatgatttttggaaaagagagcgccggagcttcaaacactgcattggacaatgtcatgatcacagacgaagaggaaatcaaagccactaaccccgtggccaccgaaagatttgggactgtggcagtcaatctccagagcagcagcacagaccctgcgaccggagatgtgcatgttatgggagcattacctggcatggtgtggcaagatagagacgtgtacctgcagggtcccatttgggccaaaattcctcacacagatggacactttcacccgtctcctcttatgggcggctttggactcaagaacccgcctcctcagatcctcatcaaaaacacgcctgttcctgcgaatcctccggcggagttttcagctacaaagtttgcttcattcatcacccaatactccacaggacaagtgagtgtggaaattgaatgggagctgcagaaagaaaacagcaagcgctggaatcccgaagtgcagtacacatccaattatgcaaaatctgccaacgttgattttactgtggacaacaatggactttatactgagcctcgccccattggcacccgttaccttacccgtcccctgtaa

SEQ ID NO: 353 - protein, 736 aa, Artificial Sequence
  Description of Artificial Sequence: Synthetic polypeptide
MAADGYLPDWLEDNLSEGIREWWDLKPGAPKPKANQQHQDNARGLVLPGYKYLGPGNGLDKGEPVNAADAAALEHDKAYDQQLKAGDNPYLKYNHADAEFQERLKEDTSFGGNLGRAVFQAKKRLLEPLGLVEEAAKTAPGKKRPVEPSPQRSPDSSTGIGKKGQQPAKKRLNFGQTGDSESVPDPQPLGEPPATPAAVGPTTMASGGGAPMADNNEGADGVGNSSGNWHCDSQWLGDRVITTSTRTWALPTYNNHLYKQISSQSGASNDNHYFGYSTPWGYFDFNRFHCHFSPRDWQRLINNNWGFRPKRLNFKLFNIQVKEVTTNDGVTTIANNLTSTVQVFSDSEYQLPYVLGSAHQGCLPPFPADVFMIPQYGYLTLNNGSQAVGRSSFYCLEYFPSQMLRTGNNFTFSYTFEDVPFHSSYAHSQSLDRLMNPLIDQYLYYLSRTNTPSGTTTQSRLQFSQAGASDIRDQSRNWLPGPCYRQQRVSKTKTDNNNSNFTWTGASKYNLNGRESIINPGTAMASHKDDEDKFFPMSGVMIFGKESAGASNTALDNVMITDEEEIKATNPVATERFGTVAVNLQSSSTDPATGDVHVMGALPGMVWQDRDVYLQGPIWAKIPHTDGHFHPSPLMGGFGLKNPPPQILIKNTPVPANPPAEFSATKFASFITQYSTGQVSVEIEWELQKENSKRWNPEVQYTSNYAKSANVDFTVDNNGLYTEPRPIGTRYLTRPL

SEQ ID NO: 354 - DNA, 2214 bp, Artificial Sequence; identical to SEQ ID NO: 326
  Description of Artificial Sequence: Synthetic polynucleotide

SEQ ID NO: 355 - protein, 737 aa, Artificial Sequence; identical to SEQ ID NO: 327
  Description of Artificial Sequence: Synthetic polypeptide

SEQ ID NO: 356 - DNA, 2205 bp, Artificial Sequence
  Description of Artificial Sequence: Synthetic polynucleotide
atggctgctgacggttatcttccagattggctcgaggacaacctttctgaaggcattcgtgagtggtgggctctgaaacctggagtccctcaacccaaagcgaaccaacaacaccaggacaaccgtcggggtcttgtgcttccgggttacaaatacctcggacccggtaacggactcgacaaaggagagccggtcaacgaggcggacgcggcagccctcgaacacgacaaggcctacgaccagcagctcaaggccggagacaacccgtacctcaagtacaaccacgccgacgccgagttccaggagcggctcaaagaagatacgtcttttgggggcaacctcgggcgagcagtcttccaggccaaaaagaggcttcttgaacctcttggtctggttgaggaagcggctaagacggctcctggaaagaagaggcctgtagagcagtctcctcaggaaccggactcctccgcgggtattggcaaatcgggtgcacagcccgctaaaaagagactcaatttcggtcagactggcgacacagagtcagtcccagaccctcaaccaatcggagaacctcccgcagccccctcaggtgtgggatctcttacaatggcttcaggtggtggcgcaccagtggcagacaataacgaaggtgccgatggagtgggtagttcctcgggaaattggcattgcgattcccaatggctgggggacagagtcatcaccaccagcacccgaacctgggccctgcccacctacaacaaccacctctacaaacaaatttccagccaatcaggagcctcgaacgacaatcactactttggctacagcaccccttgggggtattttgacttcaacagattccactgccacttttcaccacgtgactggcagcgactcatcaacaacaactggggattccggcccaagagactcagcttcaagctcttcaacatccaggtcaaagaggttacggacaacaatggagtcaagaccatcgccaataaccttaccagcacggtccaggtcttcacggactcagactatcagctcccgtacgtgctcgggtcggctcacgagggctgcctcccgccgttcccagcggacgttttcatgattcctcagtacgggtatctgacgcttaatgatggaagccaggccgtgggtcgttcgtccttttactgcctggaatatttcccgtcgcaaatgctaagaacgggtaacaacttccagttcagctacgagtttgagaacgtacctttccatagcagctacgctcacagccaaagcctggaccgactaatgaatccactcatcgaccaatacttgtactatctctcaaagactattaacggttctggacagaatcaacaaacgctaaaattcagtgtggccggacccagcaacatggctgtccagggaagaaactacatacctggacccagctaccgacaacaacgtgtctcaaccactgtgactcaaaacaacaacagcgaatttgcttggcctggagcttcttcttgggctctcaatggacgtaatagcttgatgaatcctggacctgctatggccagccacaaagaaggagaggaccgtttctttcctttgtctggatctttaatttttggcaaacaaggaactggaagagacaacgtggatgcggacaaagtcatgataaccaacgaagaagaaattaaaactactaacccggtagcaacggagtcctatggacaagtggccacaaaccaccagagtgcccaagcacaggcgcagaccggctgggttcaaaaccaaggaatacttccgggtatggtttggcaggacagagatgtgtacctgcaaggacccatttgggccaaaattcctcacacggacggcaactttcacccttctccgctgatgggagggtttggaatgaaacacccgcctcctcagatcctcatcaaaaacacacctgtacctgcggatcctccaacggccttcaacaaggacaagctgaactctttcatcacccagtattctactggccaagtcagcgtggagatcgagtgggagctgcagaaggaaaacagcaagcgctggaaccccgagatccagtacacctccaactactacaaatctacaagtgtggactttgctgttaatacagaaggcgtgtactctgaaccccgccccattggcacccgttacctcacccgtaatctgtaa

SEQ ID NO: 357 - protein, 734 aa, Artificial Sequence
  Description of Artificial Sequence: Synthetic polypeptide
MAADGYLPDWLEDNLSEGIREWWALKPGVPQPKANQQHQDNRRGLVLPGYKYLGPGNGLDKGEPVNEADAAALEHDKAYDQQLKAGDNPYLKYNHADAEFQERLKEDTSFGGNLGRAVFQAKKRLLEPLGLVEEAAKTAPGKKRPVEQSPQEPDSSAGIGKSGAQPAKKRLNFGQTGDTESVPDPQPIGEPPAAPSGVGSLTMASGGGAPVADNNEGADGVGSSSGNWHCDSQWLGDRVITTSTRTWALPTYNNHLYKQISSQSGASNDNHYFGYSTPWGYFDFNRFHCHFSPRDWQRLINNNWGFRPKRLSFKLFNIQVKEVTDNNGVKTIANNLTSTVQVFTDSDYQLPYVLGSAHEGCLPPFPADVFMIPQYGYLTLNDGSQAVGRSSFYCLEYFPSQMLRTGNNFQFSYEFENVPFHSSYAHSQSLDRLMNPLIDQYLYYLSKTINGSGQNQQTLKFSVAGPSNMAVQGRNYIPGPSYRQQRVSTTVTQNNNSEFAWPGASSWALNGRNSLMNPGPAMASHKEGEDRFFPLSGSLIFGKQGTGRDNVDADKVMITNEEEIKTTNPVATESYGQVATNHQSAQAQAQTGWVQNQGILPGMVWQDRDVYLQGPIWAKIPHTDGNFHPSPLMGGFGMKHPPPQILIKNTPVPADPPTAFNKDKLNSFITQYSTGQVSVEIEWELQKENSKRWNPEIQYTSNYYKSTSVDFAVNTEGVYSEPRPIGTRYLTRNL

SEQ ID NO: 358 - DNA, 2217 bp, Artificial Sequence
  Description of Artificial Sequence: Synthetic polynucleotide
atggctgccgatggttatcttccagattggctcgaggacaacctctctgagggcattcgcgagtggtgggcgctgaaacctggagccccgaagcccaaagccaaccagcaaaagcaggacgacggccggggtctggtgcttcctggctacaagtacctcggacccttcaacggactcgacaagggggagcccgtcaacgcggcggacgcagcggccctcgagcacgacaaggcctacgaccagcagctgcaggcgggtgacaatccgtacctgcggtataaccacgccgacgccgagtttcaggagcgtctgcaagaagatacgtcttttgggggcaacctcgggcgagcagtcttccaggccaagaagcgggttctcgaacctctcggtctggttgaggaaggcgctaagacggctcctggaaagaagagaccggtagagccatcaccccagcgttctccagactcctctacgggcatcggcaagaaaggccaacagcccgccagaaaaagactcaattttggtcagactggcgactcagagtcagttccagaccctcaacctctcggagaacctccagcagcgccctctggtgtgggacctaatacaatggctgcaggcggtggcgcaccaatggcagacaataacgaaggcgccgacggagtgggtagttcctcgggaaattggcattgcgattccacatggctgggcgacagagtcatcaccaccagcacccgaacctgggccctgcccacctacaacaaccacctctacaagcaaatctccaacgggacatcgggaggagccaccaacgacaacacctacttcggctacagcaccccctgggggtattttgactttaacagattccactgccacttttcaccacgtgactggcagcgactcatcaacaacaactggggattccggcccaagagactcagcttcaagctcttcaacatccaggtcaaggaggtcacgcagaatgaaggcaccaagaccatcgccaataacctcaccagcaccatccaggtgtttacggactcggagtaccagctgccgtacgttctcggctctgcccaccagggctgcctgcctccgttcccggcggacgtgttcatgattccccagtacggctacctaacactcaacaacggtagtcaggccgtgggacgctcctccttctactgcctggaatactttccttcgcagatgctgagaaccggcaacaacttccagtttacttacaccttcgaggacgtgcctttccacagcagctacgcccacagccagagcttggaccggctgatgaatcctctgattgaccagtacctgtactacttgtctcggactcaaacaacaggaggcacggcaaatacgcagactctgggcttcagccaaggtgggcctaatacaatggccaatcaggcaaagaactggctgccaggaccctgttaccgccaacaacgcgtctcaacgacaaccgggcaaaacaacaatagcaactttgcctggactgctgggaccaaataccatctgaatggaagaaattcattggctaatcctggcatcgctatggcaacacacaaagacgacgaggagcgtttttttcccagtaacgggatcctgatttttggcaaacaaaatgctgccagagacaatgcggattacagcgatgtcatgctcaccagcgaggaagaaatcaaaaccactaaccctgtggctacagaggaatacggtatcgtggcagataacttgcagcagcaaaacacggctcctcaaattggaactgtcaacagccagggggccttacccggtatggtctggcagaaccgggacgtgtacctgcagggtcccatctgggccaagattcctcacacggacggcaacttccacccctctcccctcatgggtggattcggacttaaacatcctccgcctcagatcctgatcaagaacacgcctgtacctgcggatcctccgaccaccttcaaccagtcaaagctgaactctttcatcacgcaatacagcaccggacaggtcagcgtggaaattgaatgggagctgcagaaggaaaacagcaagcgctggaaccccgagatccagtacacctccaactactacaaatctacaagtgtggactttgctgttaatacagaaggcgtgtactctgaaccccgccccattggcacccgttacctcacccgtaatctgtaa

SEQ ID NO: 359 - protein, 738 aa, Artificial Sequence; identical to SEQ ID NO: 105
  Description of Artificial Sequence: Synthetic polypeptide

SEQ ID NO: 360 - DNA, 2211 bp, Artificial Sequence
  Description of Artificial Sequence: Synthetic polynucleotide
atggctgctgacggttatcttccagattggctcgaggacaacctttctgaaggcattcgagagtggtgggcgctgcaacctggagcccctaaacccaaggcaaatcaacaacatcaggacaacgctcggggtcttgtgcttccgggttacaaatacctcggacccggcaacggactcgacaagggggaacccgtcaacgcagcggacgcggcagccctcgagcacgacaaggcctacgaccagcagctcaaggccggtgacaacccctacctcaagtacaaccacgccgacgccgagttccaggagcggctcaaagaagatacgtcttttgggggcaacctcgggcgagcagtcttccaggccaaaaagaggcttcttgaacctcttggtctggttgaggaagcggctaagacggctcctggaaagaagaggcctgtagatcagtctcctcaggaaccggactcatcatctggtgttggcaaatcgggcaaacagcctgccagaaaaagactaaatttcggtcagactggcgactcagagtcagtcccagaccctcaacctctcggagaaccaccagcagcccccacaagtttgggatctaatacaatggcttcaggcggtggcgcaccaatggcagacaataacgagggtgccgatggagtgggtaattcctcaggaaattggcattgcgattcccaatggctgggcgacagagtcatcaccaccagcaccagaacctgggccctgcccacttacaacaaccatctctacaagcaaatctccagccaatcaggagcttcaaacgacaaccactactttggctacagcaccccttgggggtattttgactttaacagattccactgccacttctcaccacgtgactggcagcgactcattaacaacaactggggattccggcccaagaaactcagcttcaagctcttcaacatccaagttaaagaggtcacgcagaacgatggcacgacgactattgccaataaccttaccagcacggttcaggtgtttacggactcggagtatcagctcccgtacgtgctcgggtcggcgcaccaaggctgtctcccgccgtttccagcggacgtcttcatggtccctcagtatggatacctcaccctgaacaacggaagtcaagcggtgggacgctcatccttttactgcctggagtacttcccttcgcagatgctaaggactggaaataacttccaattcagctataccttcgaggatgtaccttttcacagcagctacgctcacagccagagtttggatcgcttgatgaatcctcttattgatcagtatctgtactacctgaacagaacgcaaggaacaacctctggaacaaccaaccaatcacggctgctttttagccaggctgggcctcagtctatgtctttgcaggccagaaattggctacctgggccctgctaccggcaacagagactttcaaagactgctaacgacaacaacaacagtaactttccttggacagcggccagcaaatatcatctcaatggccgcgactcgctggtgaatccaggaccagctatggccagtcacaaggacgatgaagaaaaatttttccctatgcacggcaatctaatatttggcaaagaagggacaacggcaagtaacgcagaattagataatgtaatgattacggatgaagaagagattcgtaccaccaatcctgtggcaacagagcagtatggaactgtggcaaataacttgcagagctcaaatacagctcccacgactagaactgtcaatgatcagggggccttacctggcatggtgtggcaagatcgtgacgtgtaccttcaaggacctatctgggcaaagattcctcacacggatggacactttcatccttctcctctgatgggaggctttggactgaaacatccgcctcctcaaatcatgatcaaaaatactccggtaccggcaaatcctccgacgactttcagcccggccaagtttgcttcatttatcactcagtactccactggacaggtcagcgtggaaattgagtgggagctacagaaagaaaacagcaaacgttggaatccagagattcagtacacttccaactacaacaagtctgttaatgtggactttactgtagacactaatggtgtttatagtgaacctcgccccattggcacccgttaccttacccgtcccctgtaa

SEQ ID NO: 361 - protein, 736 aa, Artificial Sequence; identical to SEQ ID NO: 331
  Description of Artificial Sequence: Synthetic polypeptide

SEQ ID NO: 362 - DNA, 2211 bp, Artificial Sequence; identical to SEQ ID NO: 330
  Description of Artificial Sequence: Synthetic polynucleotide

SEQ ID NO: 363 - protein, 736 aa, Artificial Sequence; identical to SEQ ID NO: 331
  Description of Artificial Sequence: Synthetic polypeptide

SEQ ID NO: 364 - DNA, 2211 bp, Artificial Sequence
  Description of Artificial Sequence: Synthetic polynucleotide
atggctgctgacggttatcttccagattggctcgaggacaacctttctgaaggcattcgtgagtggtgggctctgaaacctggagtccctcaacccaaagcgaaccaacaacaccaggacaaccgtcggggtcttgtgcttccgggttacaaatacctcggacccggtaacggactcgacaaaggagagcccgtcaacgcggcggatgcagcggccctcgagcacgacaaggcctacgaccagcagctcaaagcgggtgacaatccgtacctgcggtataaccacgccgacgccgagtttcaggagcgtctgcaagaagatacgtcttttgggggcaacctcgggcgagcagtcttccaggccaagaagagggttctcgaaccttttggtctggttgaggaaggtgctaagacggctcctggaaagaaacgtccggtagagcagtcgccacaagagccagactcctcctcgggcatcggcaagacaggccagcagcccgctaaaaagagactcaattttggtcagactggcgactcagagtcagtccccgacccacaacctctcggagaacctccagcaacccccgctgctgtgggacctactacaatggcttcaggcggtggcgcaccaatggcagacaataacgaaggcgccgacggagtgggtaatgcctcaggaaattggcattgcgattccacatggctgggcgacagagtcatcaccaccagcacccgcacctgggccttgcccacctacaataaccacctctacaagcaaatctccagtgcttcaacgggggccagcaacgacaaccactacttcggctacagcaccccctgggggtattttgatttcaacagattccactgccatttctcaccacgtgactggcagcgactcatcaacaacaattggggattccggcccaagagactcaacttcaagctcttcaacatccaagtcaaggaggtcacgacgaatgatggcgtcacgaccatcgctaataaccttaccagcacggttcaagtcttctcggactcggagtaccagcttccgtacgtcctcggctctgcgcaccagggctgcctccctccgttcccggcggacgtgttcatgattccgcaatacggctacctgacgctcaacaatggcagccaagccgtgggacgttcatccttttactgcctggaatatttcccttctcagatgctgagaacgggcaacaactttaccttcagctacacctttgaggaagtgcctttccacagcagctacgcgcacagccagagcctggaccggctgatgaatcctctcatcgaccaatacctgtattacctgaacagaactcaaaatcagtccggaagtgcccaaaacaaggacttgctgtttagccgtgggtctccagctggcatgtctgttcagcccaaaaactggctacctggaccctgttatcggcagcagcgcgtttctaaaacaaaaacagacaacaacaacagcaattttacctggactggtgcttcaaaatataacctcaatgggcgtgaatccatcatcaaccctggcactgctatggcctcacacaaagacgacgaagacaagttctttcccatgagcggtgtcatgatttttggaaaagagagcgccggagcttcaaacactgcattggacaatgtcatgattacagacgaagaggaaattaaagccactaaccctgtggccaccgaaagatttgggaccgtggcagtcaatttccagagcagcagcacagaccctgcgaccggagatgtgcatgttatgggagccttacctggaatggtgtggcaagacagagacgtatacctgcagggtcctatttgggccaaaattcctcacacggatggacactttcacccgtctcctctcatgggcggctttggacttaagcacccgcctcctcagatcctcatcaaaaacacgcctgttcctgcgaatcctccggcagagttttcggctacaaagtttgcttcattcatcacccagtattccacaggacaagtgagcgtggagattgaatgggagctgcagaaagaaaacagcaaacgctggaatcccgaagtgcagtatacatctaactatgcaaaatctgccaacgttgatttcactgtggacaacaatggactttatactgagcctcgccccattggcacccgttacctcacccgtcccctgtaa

SEQ ID NO: 365 - protein, 736 aa, Artificial Sequence
  Description of Artificial Sequence: Synthetic polypeptide
MAADGYLPDWLEDNLSEGIREWWALKPGVPQPKANQQHQDNRRGLVLPGYKYLGPGNGLDKGEPVNAADAAALEHDKAYDQQLKAGDNPYLRYNHADAEFQERLQEDTSFGGNLGRAVFQAKKRVLEPFGLVEEGAKTAPGKKRPVEQSPQEPDSSSGIGKTGQQPAKKRLNFGQTGDSESVPDPQPLGEPPATPAAVGPTTMASGGGAPMADNNEGADGVGNASGNWHCDSTWLGDRVITTSTRTWALPTYNNHLYKQISSASTGASNDNHYFGYSTPWGYFDFNRFHCHFSPRDWQRLINNNWGFRPKRLNFKLFNIQVKEVTTNDGVTTIANNLTSTVQVFSDSEYQLPYVLGSAHQGCLPPFPADVFMIPQYGYLTLNNGSQAVGRSSFYCLEYFPSQMLRTGNNFTFSYTFEEVPFHSSYAHSQSLDRLMNPLIDQYLYYLNRTQNQSGSAQNKDLLFSRGSPAGMSVQPKNWLPGPCYRQQRVSKTKTDNNNSNFTWTGASKYNLNGRESIINPGTAMASHKDDEDKFFPMSGVMIFGKESAGASNTALDNVMITDEEEIKATNPVATERFGTVAVNFQSSSTDPATGDVHVMGALPGMVWQDRDVYLQGPIWAKIPHTDGHFHPSPLMGGFGLKHPPPQILIKNTPVPANPPAEFSATKFASFITQYSTGQVSVEIEWELQKENSKRWNPEVQYTSNYAKSANVDFTVDNNGLYTEPRPIGTRYLTRPL

SEQ ID NO: 366 - DNA, 2217 bp, Artificial Sequence
  Description of Artificial Sequence: Synthetic polynucleotide
atggctgccgatggttatcttccagattggctcgaggacaacctctctgagggcattcgcgagtggtgggacttgaaacctggagccccgaaacccaaagccaaccagcaaaagcaggacgacggccggggtctggtgcttcctggctacaagtacctcggacccttcaacggactcgacaagggggagcccgtcaacgcggcggatgcaacggccctcgagcacgacaaggcctacgaccagcagctgcaggcgggtgacaatccgtacctgcggtataaccacgccgacgccgagtttcaggagcgtctgcaagaagatacgtcttttgggggcaacctcgggcgagcagtcttccaggccaagaagcgggttctcgaacctctcggtctggttgaggaaggcgctaagacggctcctggaaagaagagaccggtagagccatcaccccagcgttctccagactcctctacgggcatcggcaagaaaggccaacagcccgccagaaaaagactcaattttggtcagactggcgactcagagtcagttccagaccctcaacctctcggagaaccaccagcagcccccacaagtttgggatctaatacaatggcttcaggcggtggcgcaccaatggcagacaataacgagggtgccgatggagtgggtaattcctcaggaaattggcattgcgattcccaatggctgggcgacagagtcatcaccaccagcacccgcacctgggccttgcccacctacaataaccacctctacaagcaaatctccagtgcttcaacgggggccagcaacgacaaccactacttcggctacagcaccccctgggggtattttgactttaaccgcttccactgccacttctcgccaagagactggcaaagactcatcaacaacaattggggattccggcccaagagactcaacttcaaactcttcaacatccaagtcaaggaggtcacgacgaatgatggcgtcacgaccatcgccaataacctcaccagcaccatccaggtgtttacggactcggagtaccagctgccgtacgttctcggctctgcccaccagggctgcctgcctccgttcccggcggacgtgttcatgattccccagtatggatacctcaccctgaacaacggaagtcaagcggtgggacgctcatccttttactgcctggagtacttcccttcgcagatgctaaggactggaaataacttccaattcagctataccttcgaggatgtaccttttcacagcagctacgctcacagccagagtttggatcgcttgatgaatcctcttattgatcagtatctgtactacctgaacagaacgcaaggaacaacctctggaacaaccaaccaatcacggctgctttttagccaggctgggcctcagtctatgtctttgcaggccagaaattggctacctgggccctgctaccggcaacagagactttcaaagactgctaacgacaacaacaacagtaactttccttggacagcagccagcaaatatcatctcaatggccgcgactcgctggtgaatccaggaccagctatggccagtcacaaggacgatgaagaaaaatttttccctatgcacggcaatctaatatttggcaaagaagggacaacggcaagtaacgcagaattagataatgtaatgattacggatgaagaagagattcgtaccaccaatcctgtggcaacagagcagtatggaactgtggcaaataacttgcagagctcaaatacagctcccacgactagaactgtcaatgatcagggggccttacctggcatggtgtggcaagatcgtgacgtgtaccttcaggggcccatctgggcaaagattccacacacggacggacattttcacccctctcccctcatgggtggattcggacttaaacaccctcctccgcagattctcatcaagaacaccccggtacctgcgaatccttcgaccaccttcagtgcggcaaagtttgcttccttcatcacacagtactccacgggacaggtcagcgtggagatcgagtgggagctgcagaaggaaaacagcaagcgctggaacccggagatccagtacacttccaactattacaagtctaataatgttgaatttgctgttaatactgaaggtgtatatagtgaaccccgccccattggcaccagatacctgactcgtaatctgtaa

SEQ ID NO: 367 - protein, 738 aa, Artificial Sequence
  Description of Artificial Sequence: Synthetic polypeptide
MAADGYLPDWLEDNLSEGIREWWDLKPGAPKPKANQQKQDDGRGLVLPGYKYLGPFNGLDKGEPVNAADATALEHDKAYDQQLQAGDNPYLRYNHADAEFQERLQEDTSFGGNLGRAVFQAKKRVLEPLGLVEEGAKTAPGKKRPVEPSPQRSPDSSTGIGKKGQQPARKRLNFGQTGDSESVPDPQPLGEPPAAPTSLGSNTMASGGGAPMADNNEGADGVGNSSGNWHCDSQWLGDRVITTSTRTWALPTYNNHLYKQISSASTGASNDNHYFGYSTPWGYFDFNRFHCHFSPRDWQRLINNNWGFRPKRLNFKLFNIQVKEVTTNDGVTTIANNLTSTIQVFTDSEYQLPYVLGSAHQGCLPPFPADVFMIPQYGYLTLNNGSQAVGRSSFYCLEYFPSQMLRTGNNFQFSYTFEDVPFHSSYAHSQSLDRLMNPLIDQYLYYLNRTQGTTSGTTNQSRLLFSQAGPQSMSLQARNWLPGPCYRQQRLSKTANDNNNSNFPWTAASKYHLNGRDSLVNPGPAMASHKDDEEKFFPMHGNLIFGKEGTTASNAELDNVMITDEEEIRTTNPVATEQYGTVANNLQSSNTAPTTRTVNDQGALPGMVWQDRDVYLQGPIWAKIPHTDGHFHPSPLMGGFGLKHPPPQILIKNTPVPANPSTTFSAAKFASFITQYSTGQVSVEIEWELQKENSKRWNPEIQYTSNYYKSNNVEFAVNTEGVYSEPRPIGTRYLTRNL

SEQ ID NO: 368 - DNA, 2208 bp, Artificial Sequence
  Description of Artificial Sequence: Synthetic polynucleotide
atggctgccgatggttatcttccagattggctcgaggacaaccttagtgaaggaattcgcgagtggtgggacttgaaacctggagccccgaagcccaaagccaaccagcaaaagcaggacgacggccggggtctggtgcttcctggctacaagtacctcggacccttcaacggactcgacaagggggagcccgtcaacgcggcggacgcagcggccctcgagcacgacaaggcctacgaccagcagctcaaagcgggtgacaatccgtacctgcggtataaccacgccgacgccgagtttcaggagcgtctgcaagaagatacgtcttttgggggcaacctcgggcgagcagtcttccaggccaagaagcgggttctcgaacctctcggtctggttgaggaaggtgctaagacggctcctggaaagaaacgtccggtagagcagtcgccacaagagccagactcctcctcgggcattggcaagacaggccagcagcccgctaaaaagagactcaattttggtcagactggcgactcagagtcagtccccgacccacaacctctcggagaacctccagcaacccccgctgctgtgggacctactacaatggcttcaggcggtggcgcaccaatggcagacaataacgaaggcgccgacggagtgggtaatgcctcaggaaattggcattgcgattccacatggctgggcgacagagtcatcaccaccagcacccgaacctgggccctgcccacctacaacaaccacctctacaaacaaatttccagccaatcaggagcctcgaacgacaatcactactttggctacagcaccccttgggggtattttgatttcaacagattccactgccacttttcaccacgtgactggcagcgactcatcaacaacaattggggattccggcccaagagactcagcttcaagctcttcaacatccaggtcaaggaggtcacgcagaatgaaggcaccaagaccatcgccaataaccttaccagcacggttcaagtgtttacggactcggagtatcagctcccgtacgtgctcggctcggcgcatcaaggatgcctcccgccgttcccagcagacgtcttcatggtgccacagtatggatacctcaccctgaacaacgggagtcaggcagtaggacgctcttcattttactgcctggagtactttccttctcagatgctgcgtaccggaaacaactttaccttcagctacacttttgaggacgttcctttccacagcagctacgctcacagccagagtctggaccgtctcatgaatcctctgattgaccagtacctgtattacttgagcagaacaaacactccaagtggaaccaccacgcagtcaaggcttcagttttctcaggccggagcgagtgacattcgggaccagtctaggaactggcttcctggaccctgttaccgccagcagcgagtatcaaagacatctgcggataacaacaacagtgaatactcgtggactggagctaccaagtaccacctcaatggcagagactctctggtgaatccgggcccggccatggcaagccacaaggactatgaagaaaagttttttcctcagagcggggttctcatctttgggaagcaaggctcagagaaaacaaatgtggacattgaaaaggtcatgattacagacgaagaggaaatcaggacaaccaatcccgtggctacggagcagtatggttctgtatctaccaacctccagagaggcaacagacaagcagctaccgcagatgtcaacacacaaggcgttcttccaggcatggtctggcaggacagagatgtgtaccttcaggggcccatctgggcaaagattccacacacggacggacattttcacccgtctccgctgatgggcggctttggcctgaaacatcctccgcctcagatcctgatcaagaacacgcctgtacctgcggatcctccgaccaccttcaaccagtcaaagctgaactctttcatcactcagtattctactggccaagtcagcgtggagatcgagtgggagctgcagaaggaaaacagcaagcgctggaaccccgagatccagtacacctccaactactacaaatctacaagtgtggactttgctgttaatacagaaggcgtgtactctgaaccccgccccattggcacccgttacctcacccgtaatctgtaa

SEQ ID NO: 369 - protein, 735 aa, Artificial Sequence
  Description of Artificial Sequence: Synthetic polypeptide
MAADGYLPDWLEDNLSEGIREWWDLKPGAPKPKANQQKQDDGRGLVLPGYKYLGPFNGLDKGEPVNAADAAALEHDKAYDQQLKAGDNPYLRYNHADAEFQERLQEDTSFGGNLGRAVFQAKKRVLEPLGLVEEGAKTAPGKKRPVEQSPQEPDSSSGIGKTGQQPAKKRLNFGQTGDSESVPDPQPLGEPPATPAAVGPTTMASGGGAPMADNNEGADGVGNASGNWHCDSTWLGDRVITTSTRTWALPTYNNHLYKQISSQSGASNDNHYFGYSTPWGYFDFNRFHCHFSPRDWQRLINNNWGFRPKRLSFKLFNIQVKEVTQNEGTKTIANNLTSTVQVFTDSEYQLPYVLGSAHQGCLPPFPADVFMVPQYGYLTLNNGSQAVGRSSFYCLEYFPSQMLRTGNNFTFSYTFEDVPFHSSYAHSQSLDRLMNPLIDQYLYYLSRTNTPSGTTTQSRLQFSQAGASDIRDQSRNWLPGPCYRQQRVSKTSADNNNSEYSWTGATKYHLNGRDSLVNPGPAMASHKDYEEKFFPQSGVLIFGKQGSEKTNVDIEKVMITDEEEIRTTNPVATEQYGSVSTNLQRGNRQAATADVNTQGVLPGMVWQDRDVYLQGPIWAKIPHTDGHFHPSPLMGGFGLKHPPPQILIKNTPVPADPPTTFNQSKLNSFITQYSTGQVSVEIEWELQKENSKRWNPEIQYTSNYYKSTSVDFAVNTEGVYSEPRPIGTRYLTRNL

SEQ ID NO: 370 - DNA, 2214 bp, Artificial Sequence
  Description of Artificial Sequence: Synthetic polynucleotide
atggctgccgatggttatcttccagattggctcgaggacaacctctctgagggcattcgcgagtggtgggacttgaaacctggagccccgaaacccaaagccaaccagcaaaagcaggacgacggccggggtctggtgcttcctggctacaagtacctcggacccttcaacggactcgacaagggggagcccgtcaacgcggcggatgcagcggccctcgagcacgacaaggcctacgaccagcagctcaaagcgggtgacaatccgtacctgcggtataaccacgccgacgccgagtttcaggagcgtctgcaagaagatacgtcttttgggggcaacctcgggcgagcagtcttccaggccaagaagagggttctcgaaccttttggtctggttgaggaaggtgctaagacggctcctggaaagaaacgtccggtagagcagtcgccacaagagccagactcctcctcgggcattggcaagacaggccagcagcctgcaagaaaaagattgaattttggtcagactggagacgcagactcagtacctgacccccagcctctcggacagccaccagcagccccctctggtctgggaactaatacgatggctacaggcagtggcgcaccaatggcagacaataacgagggcgccgacggagtgggtaattcctcgggaaattggcattgcgattcccaatggctgggggacagagtcatcaccaccagcacccgaacctgggccctgcccacctacaacaatcacctctacaagcaaatctccaacagcacatctggaggatcttcaaatgacaacgcctacttcggctacagcaccccctgggggtattttgatttcaacagattccactgccatttctcaccacgtgactggcagcgactcatcaacaacaattggggattccggcccaagagactcaacttcaagctcttcaacatccaggtcaaggaggtcacgcagaatgaaggcaccaagaccatcgccaataacctcaccagcaccatccaggtgtttacggactcggagtaccagctgccgtacgttctcggctctgcccaccagggctgcctgcctccgttcccggcggacgtgttcatgattccccagtacggctacctaacactcaacaacggtagtcaggccgtgggacgctcctccttctactgcctggaatactttccttcgcagatgctgagaaccggcaacaacttccagtttacttacaccttcgaggacgtgcctttccacagcagctacgcccacagccagagcttggaccggctgatgaatcctctgattgaccagtacctgtactacttgtctcggactcaaacaacaggaggcacgacaaatacgcagactctgggcttcagccaaggtgggcctaatacaatggccaatcaggcaaagaactggctgccaggaccctgttaccgccagcagcgagtatcaaagacatttgcggataacaacaacagtgaatactcgtggactggagctaccaagtaccacctcaatggcagagactctctggtgaatccgggcccggccatggcaagccacaaggacgatgaagaaaagttttttcctcagagcggggttctcatctttgggaagcaaggctcagagaaaacaaatgtggacattgaaaaggtcatgattacagacgaagaggaaatcaggacaaccaatcccgtggctacggagcagtatggttctgtatctaccaacctccagagaggcaacagacaagcagctaccgcagatgtcaacacacaaggcgttcttccaggcatggtctggcaggacagagatgtgtaccttcaggggcccatctgggcaaagattccacacacggacggacattttcacccctctcccctcatgggtggattcggacttaaacaccctccgcctcagatcctgatcaagaacacgcctgtacccgcggatcctccgaccaccttcaaccagtcaaagctgaactctttcatcacccagtattctactggccaagtcagcgtggagatcgagtgggagctgcagaaggaaaacagcaagcgctggaaccccgagatccagtacacctccaactactacaaatctacaagtgtggactttgctgttaatacagaaggcgtgtactctgaaccccgccccattggcacccgttacctcacccgtaatctgtaa

SEQ ID NO: 371 - protein, 737 aa, Artificial Sequence
  Description of Artificial Sequence: Synthetic polypeptide
MAADGYLPDWLEDNLSEGIREWWDLKPGAPKPKANQQKQDDGRGLVLPGYKYLGPFNGLDKGEPVNAADAAALEHDKAYDQQLKAGDNPYLRYNHADAEFQERLQEDTSFGGNLGRAVFQAKKRVLEPFGLVEEGAKTAPGKKRPVEQSPQEPDSSSGIGKTGQQPARKRLNFGQTGDADSVPDPQPLGQPPAAPSGLGTNTMATGSGAPMADNNEGADGVGNSSGNWHCDSQWLGDRVITTSTRTWALPTYNNHLYKQISNSTSGGSSNDNAYFGYSTPWGYFDFNRFHCHFSPRDWQRLINNNWGFRPKRLNFKLFNIQVKEVTQNEGTKTIANNLTSTIQVFTDSEYQLPYVLGSAHQGCLPPFPADVFMIPQYGYLTLNNGSQAVGRSSFYCLEYFPSQMLRTGNNFQFTYTFEDVPFHSSYAHSQSLDRLMNPLIDQYLYYLSRTQTTGGTTNTQTLGFSQGGPNTMANQAKNWLPGPCYRQQRVSKTFADNNNSEYSWTGATKYHLNGRDSLVNPGPAMASHKDDEEKFFPQSGVLIFGKQGSEKTNVDIEKVMITDEEEIRTTNPVATEQYGSVSTNLQRGNRQAATADVNTQGVLPGMVWQDRDVYLQGPIWAKIPHTDGHFHPSPLMGGFGLKHPPPQILIKNTPVPADPPTTFNQSKLNSFITQYSTGQVSVEIEWELQKENSKRWNPEIQYTSNYYKSTSVDFAVNTEGVYSEPRPIGTRYLTRNL

SEQ ID NO: 372 - DNA, 2217 bp, Artificial Sequence
  Description of Artificial Sequence: Synthetic polynucleotide
atggctgccgatggttatcttccagattggctcgaggacactctctctgaaggaataagacagtggtgggcgctgaaacctggagccccgaagcccaaagccaaccagcaaaagcaggacgacggccggggtctggtgcttcctggctacaagtacctcggacccttcaacggactcgacaagggggagcccgtcaacgcggcggatgcagcggccctcgagcacgacaaggcctacgaccagcagctcaaagcgggtgacaatccgtacctgcggtataaccacgccgacgccgagtttcaggagcgtctgcaagaagatacgtcttttgggggcaacctcgggcgagcagtcttccaggccaagaagcgggttctcgaacctctcggtctggttgaggaaggcgctaagacggctcctggaaagaagagaccggtagagccatcaccccagcgttctccagactcctctacgggcatcggcaagaaaggccaacagcccgccagaaaaagactcaattttggtcagactggcgactcagagtcagttccagaccctcaacctctcggagaaccaccagcagcccccacaagtttgggatctaatacaatggcttcaggcggtggcgcaccaatggcagacaataacgagggtgccgatggagtgggtaattcctcaggaaattggcattgcgattcccaatggctgggcgacagagtcatcaccaccagcacccgcacctgggccttgcccacctacaataaccacctctacaagcaaatctccagtgcttcaacgggggccagcaacgacaaccactacttcggctacagcaccccctgggggtattttgactttaaccgcttccactgccacttctcgccaagagactggcaaagactcatcaacaacaattggggattccggcccaagagactcaacttcaaactcttcaacatccaagtcaaggaggtcacgacgaatgatggcgtcacgaccatcgccaataacctcaccagcaccatccaggtgtttacggactcggagtaccagctgccgtacgttctcggctctgcccaccagggctgcctgcctccgttcccggcggacgtgttcatgattccccagtatggatacctcaccctgaacaacggaagtcaagcggtgggacgctcatccttttactgcctggagtacttcccttcgcagatgctaaggactggaaataacttccaattcagctataccttcgaggatgtaccttttcacagcagctacgctcacagccagagtttggatcgcttgatgaatcctcttattgatcagtatctgtactacctgaacagaacgcaaggaacaacctctggaacaaccaaccaatcacggctgctttttagccaggctgggcctcagtctatgtctttgcaggccagaaattggctacctgggccctgctaccggcaacagagactttcaaagactgctaacgacaacaacaacagtaactttccttggacagcagccagcaaatatcatctcaatggccgcgactcgctggtgaatccaggaccagctatggccagtcacaaggacgatgaagaaaaatttttccctatgcacggcaatctaatatttggcaaagaagggacaacggcaagtaacgcagaattagataatgtaatgattacggatgaagaagagattcgtaccaccaatcctgtggcaacagagcagtatggaactgtggcaaataacttgcagagctcaaatacagctcccacgactagaactgtcaatgatcagggggccttacctggcatggtgtggcaagatcgtgacgtgtaccttcaggggcccatctgggcaaagattccacacacggacggacattttcacccctctcccctcatgggtggattcggacttaaacaccctcctccgcagattctcatcaagaacaccccggtacctgcgaatccttcgaccaccttcagtgcggcaaagtttgcttccttcatcacacagtactccacgggacaggtcagcgtggagatcgagtgggagctgcagaaggaaaacagcaagcgctggaacccggagatccagtacacttccaactattacaagtctaataatgttgaatttgctgttaatactgaaggtgtatatagtgaaccccgccccattggcaccagatacctgactcgtaatctgtaa

SEQ ID NO: 373 - protein, 738 aa, Artificial Sequence
  Description of Artificial Sequence: Synthetic polypeptide
MAADGYLPDWLEDTLSEGIRQWWALKPGAPKPKANQQKQDDGRGLVLPGYKYLGPFNGLDKGEPVNAADAAALEHDKAYDQQLKAGDNPYLRYNHADAEFQERLQEDTSFGGNLGRAVFQAKKRVLEPLGLVEEGAKTAPGKKRPVEPSPQRSPDSSTGIGKKGQQPARKRLNFGQTGDSESVPDPQPLGEPPAAPTSLGSNTMASGGGAPMADNNEGADGVGNSSGNWHCDSQWLGDRVITTSTRTWALPTYNNHLYKQISSASTGASNDNHYFGYSTPWGYFDFNRFHCHFSPRDWQRLINNNWGFRPKRLNFKLFNIQVKEVTTNDGVTTIANNLTSTIQVFTDSEYQLPYVLGSAHQGCLPPFPADVFMIPQYGYLTLNNGSQAVGRSSFYCLEYFPSQMLRTGNNFQFSYTFEDVPFHSSYAHSQSLDRLMNPLIDQYLYYLNRTQGTTSGTTNQSRLLFSQAGPQSMSLQARNWLPGPCYRQQRLSKTANDNNNSNFPWTAASKYHLNGRDSLVNPGPAMASHKDDEEKFFPMHGNLIFGKEGTTASNAELDNVMITDEEEIRTTNPVATEQYGTVANNLQSSNTAPTTRTVNDQGALPGMVWQDRDVYLQGPIWAKIPHTDGHFHPSPLMGGFGLKHPPPQILIKNTPVPANPSTTFSAAKFASFITQYSTGQVSVEIEWELQKENSKRWNPEIQYTSNYYKSNNVEFAVNTEGVYSEPRPIGTRYLTRNL

SEQ ID NO: 374 - DNA, 2208 bp, Artificial Sequence; identical to SEQ ID NO: 10
  Description of Artificial Sequence: Synthetic polynucleotide

SEQ ID NO: 375 - protein, 735 aa, Artificial Sequence [sequence omitted]

SEQ ID NO: 376 - DNA, 2208 bp, Artificial Sequence
  Description of Artificial Sequence: Synthetic polynucleotide
atggctgccgatggttatcttccagattggctcgaggacaacctctctgagggcattcgcgagtggtgggcgctgaaacctggagccccgaagcccaaagccaaccagcaaaagcaggacgacggccggggtctggtgcttcctggctacaagtacctcggacccttcaacggactcgacaagggggagcccgtcaacgcggcggacgccgcggccctcgagcacgacaaggcctacgaccagcagctgcaggcgggtgacaatccgtacctgcggtataaccacgccgacgccgagtttcaggagcgtctgcaagaagatacgtcttttgggggcaacctcgggcgagcagtcttccaggccaaaaagaggcttcttgaacctcttggtctggttgaggaagcagctaaaacggctcctggaaagaagaggcctgtagagcagtctcctcaggaaccggactcctccgcgggtattggcaaatcgggtgcacagcccgccaaaaagagactcaatttcggtcagactggcgactcagagtcagtcccagaccctcaacctctcggagaaccaccagcagcccccacaagtttgggatctaatacaatggcttcaggcggtggcgcaccaatggcagacaataacgaaggcgccgacggagtgggtaatgcctcaggaaattggcattgcgattccacatggctgggcgacagagtcatcaccaccagcacccgcacctgggccttgcccacctacagcaaccatctctacaagcaaatctccagccaatcaggagcttcaaacgacaacgactactttggctacagcaccccttgggggtattttgatttcaacagattccactgccacttttcaccacgtgactggcaaagactcatcaacaacaactggggattccgacccaagagactcaacttcaagctctttaacattcaagtcaaagaggtcacgcagaatgacggtacgacgacgattgccaataaccttaccagcacggttcaggtgtttactgactcggagtaccagctcccgtacgtcctcggctcggcgcatcaaggatgcctcccgccgttcccagcagacgtcttcatggtgccacagtatggatacctcaccctgaacaacgggagtcaggcagtaggacgctcttcattttactgcctggagtactttccttctcagatgctgcgtaccggaaacaactttaccttcagctacacttttgaggacgttcctttccacagcagctacgctcacagccagagtctggaccgtctcatgaatcctctcatcgaccagtacctgtattacttgagcagaacaaacactccaagtggaaccaccacgcagtcaaggcttcagttttctcaggccggagcgagtgacattcgggaccagtctaggaactggcttcctggaccctgttaccgccagcagcgagtatcaaagacatctgaggataacaacaacagtgaatactcgtggactggagctaccaagtaccacctcaatggcagagactctctggtgaatccgggcccggccatggcaagccacaaggacgatgaagaaaagttttttcctcagagcggggttctcatctttgggaagcaaggctcagagaaaacaaatgtggacattgaaaaggtcatgattacagacgaagaggaaatcaggacaaccaatcccgtggctacggagcagtatggttctgtatctaccaacctccagagaggcaacagacaagcagctaccgcagatgtcaacacacaaggcgttcttccaggcatggtctggcaggacagagatgtgtaccttcaggggcccatctgggcaaagattccacacacggacggacattttcacccctctcccctcatgggtggattcggacttaaacaccctcctccacagattctcatcaagaacaccccggtacctgcgaatccttcgaccaccttcagtgcggcaaagtttgcttccttcatcacacagtactccacgggacaggtcagcgtggagatcgagtgggagctgcagaaggaaaacagcaaacgctggaatcccgaaattcagtacacttccaactacaacaagtctgttaatgtggactttactgtggacactaatggcgtgtattcagagcctcgccccattggcaccagatacctgactcgtaatctgtaa

SEQ ID NO: 377 - protein, 735 aa, Artificial Sequence
  Description of Artificial Sequence: Synthetic polypeptide
MAADGYLPDWLEDNLSEGIREWWALKPGAPKPKANQQKQDDGRGLVLPGYKYLGPFNGLDKGEPVNAADAAALEHDKAYDQQLQAGDNPYLRYNHADAEFQERLQEDTSFGGNLGRAVFQAKKRLLEPLGLVEEAAKTAPGKKRPVEQSPQEPDSSAGIGKSGAQPAKKRLNFGQTGDSESVPDPQPLGEPPAAPTSLGSNTMASGGGAPMADNNEGADGVGNASGNWHCDSTWLGDRVITTSTRTWALPTYSNHLYKQISSQSGASNDNDYFGYSTPWGYFDFNRFHCHFSPRDWQRLINNNWGFRPKRLNFKLFNIQVKEVTQNDGTTTIANNLTSTVQVFTDSEYQLPYVLGSAHQGCLPPFPADVFMVPQYGYLTLNNGSQAVGRSSFYCLEYFPSQMLRTGNNFTFSYTFEDVPFHSSYAHSQSLDRLMNPLIDQYLYYLSRTNTPSGTTTQSRLQFSQAGASDIRDQSRNWLPGPCYRQQRVSKTSEDNNNSEYSWTGATKYHLNGRDSLVNPGPAMASHKDDEEKFFPQSGVLIFGKQGSEKTNVDIEKVMITDEEEIRTTNPVATEQYGSVSTNLQRGNRQAATADVNTQGVLPGMVWQDRDVYLQGPIWAKIPHTDGHFHPSPLMGGFGLKHPPPQILIKNTPVPANPSTTFSAAKFASFITQYSTGQVSVEIEWELQKENSKRWNPEIQYTSNYNKSVNVDFTVDTNGVYSEPRPIGTRYLTRNL

SEQ ID NO: 378 - DNA, 2208 bp, Artificial Sequence
  Description of Artificial Sequence: Synthetic polynucleotide
atggctgccgatggttatcttccagattggctcgaggacaacctctctgagggcattcgcgagtggtgggcgctgaaacctggagccccgaagcccaaagccaaccagcaaaagcaggacgacggccggggtctggtgcttcctggctacaagtacctcggacccttcaacggactcgacaagggggagcccgtcaacgcggcggacgcagcggccctcgagcacgacaaggcctacgaccagcagctgcaggcgggtgacaatccgtacctgcggtataaccacgccgacgccgagttccaggagcgtctgcaagaagatacgtcttttgggggcaacctcgggcgagcagtcttccaggccaagaagagggttctcgaaccttttggtctggttgaggaaggtgctaagacggctcctggaaagaaacgtccggtagagcagtcgccacaagagccagactcctcctcgggcattggcaagacaggccagcagcccgctaaaaagagactcaattttggtcagactggcgactcagagtcagtcccagaccctcaacctctcggagaaccaccagcagcccccacaagtttgggatctaatacaatggcttcaggcggtggcgcaccaatggcagacaataacgagggcgccgacggagtgggtaattcctcgggaaattggcattgcgattccacatggatgggcgacagagtcatcaccaccagcacccgaacctgggccctgcccacctacaacaaccacctctacaaacaaatttccagccaatcaggagcttcaaacgacaaccactactttggctacagcaccccttgggggtattttgactttaacagattccactgccacttttcaccacgtgactggcagcgactcattaacaacaactggggattccggcccaagaaactcaacttcaagctctttaacatccaggtcaaggaggtcacgcagaatgaaggcaccaagaccatcgccaataacctcaccagcaccatccaggtgtttacggactcggagtaccagctgccgtacgttctcggctctgcccaccagggctgcctgcctccgttcccggcggacgtgttcatgattccccagtacggctacctaacactcaacaacggtagtcaggccgtgggacgctcctccttctactgcctggaatactttccttcgcagatgctgagaaccggcaacaacttccagtttacttacaccttcgaggacgtgcctttccacagcagctacgcccacagccagagcttggaccggctgatgaatcctctgattgaccagtacctgtattacttgtctcggactcaaacaacaggaggcacgacaaatacgcagactctgggcttcagccaaggtgggcctaatacaatggccaatcaggcaaagaactggctgcctggaccctgttaccgccagcagcgagtatcaaagacatctgcggataacaacaacagtgaatactcgtggactggagctaccaagtaccacctcaatggcagagactctctggtgaatccgggcccggccatggcaagccacaaggacgatgaagaaaagttttttcctcagagcggggttctcatctttgggaagcaaggctcagagaaaacaaatgtggacattgaaaaggttatgattacagacgaagaggaaatcaggacaaccaatcccgtggctacggagcagtatggttctgtatctaccaacctccagagaggcaacagacaagcagctaccgcagatgtcaacacacagggcgttcttccaggcatggtctggcaggacagagatgtgtaccttcagggtcccatttgggccaaaattcctcacacagatggacactttcacccgtcccctcttatgggcggctttggactcaagaacccgcctcctcagatcctcatcaaaaacacgcctgttcctgcgaatcctccggcagagttttcagctacaaagtttgcttcattcatcacccaatactccacaggacaagtgagtgtggaaattgaatgggagctgcagaaagaaaacagcaagcgctggaatcccgaagtgcagtacacatccaattatgcaaaatctgccaacgttgattttactgtggacactaatggcgtgtattcagagcctcgccccattggcaccagatacctcacccgtaatctgtaa

SEQ ID NO: 379 - protein, 735 aa, Artificial Sequence
  Description of Artificial Sequence: Synthetic polypeptide
MAADGYLPDWLEDNLSEGIREWWALKPGAPKPKANQQKQDDGRGLVLPGYKYLGPFNGLDKGEPVNAADAAALEHDKAYDQQLQAGDNPYLRYNHADAEFQERLQEDTSFGGNLGRAVFQAKKRVLEPFGLVEEGAKTAPGKKRPVEQSPQEPDSSSGIGKTGQQPAKKRLNFGQTGDSESVPDPQPLGEPPAAPTSLGSNTMASGGGAPMADNNEGADGVGNSSGNWHCDSTWMGDRVITTSTRTWALPTYNNHLYKQISSQSGASNDNHYFGYSTPWGYFDFNRFHCHFSPRDWQRLINNNWGFRPKKLNFKLFNIQVKEVTQNEGTKTIANNLTSTIQVFTDSEYQLPYVLGSAHQGCLPPFPADVFMIPQYGYLTLNNGSQAVGRSSFYCLEYFPSQMLRTGNNFQFTYTFEDVPFHSSYAHSQSLDRLMNPLIDQYLYYLSRTQTTGGTTNTQTLGFSQGGPNTMANQAKNWLPGPCYRQQRVSKTSADNNNSEYSWTGATKYHLNGRDSLVNPGPAMASHKDDEEKFFPQSGVLIFGKQGSEKTNVDIEKVMITDEEEIRTTNPVATEQYGSVSTNLQRGNRQAATADVNTQGVLPGMVWQDRDVYLQGPIWAKIPHTDGHFHPSPLMGGFGLKNPPPQILIKNTPVPANPPAEFSATKFASFITQYSTGQVSVEIEWELQKENSKRWNPEVQYTSNYAKSANVDFTVDTNGVYSEPRPIGTRYLTRNL

SEQ ID NO: 380 - DNA, 2214 bp, Artificial Sequence; identical to SEQ ID NO: 370
  Description of Artificial Sequence: Synthetic polynucleotide

SEQ ID NO: 381 - protein, 737 aa, Artificial Sequence; identical to SEQ ID NO: 371
  Description of Artificial Sequence: Synthetic polypeptide

SEQ ID NO: 382 - DNA, 2196 bp, Adeno-associated virus
atggctgctgacggttatcttccagattggctcgaggacaacctctctgagggcattcgcgagtggtgggcgctgaaacctggagccccgcaacccaaagccaaccagcaaaagcaggacgacggccggggtctggtgcttcctggctacaagtacctcggacccttcaacggactcgacaagggggagcccgtcaacgaggcggacgccgcggccctcgagcacgacaaggcctacgaccagcagctcaaagcgggtgacaatccgtacctgcggtataatcacgccgacgccgagtttcaagagcgtctgcaagaagatacgtcctttgggggcaacctcgggcgagcagtcttccaggccaaaaagagggtactcgagcctctgggtctggttgaggaaggcgctaagacggctcctggaaagaagcggccagtagaaccggactccagctcgggcatcggcaagtcaggccagcagcccgcgaaaaagagactgaattttgggcagactggcgactcagagtcagtgcctgacccccaacctctctcagaaccacccgcaggtccctctggtctgggatctggtacaatggctgctggcggtggcgctccaatggcagacaataacgaaggcgccgacggagtgggtaatgtctcaggaaattggcattgcgattccacatggctgggcgaccgagtcatcaccaccagcactcggacctgggccctccccacctacaacaaccacctctacaagcaaatctccaacgggacctcgggaggcagcagcaacgacaacacctactttggctacagcaccccctgggggtattttgactttaacagattccactgccacttttcaccacgtgactggcagcgactcatcaacaacaactgggggttccggcccaagaagctcaacttcaagctcttcaacatccaggtcaaggaggtcacccagaatgaaggcaccaagaccatcgccaataacctcaccagcacggtgcaggtctttacggactcggagtaccagctcccgtacgtgctcggctctgcccaccagggctgcctgcctccgttcccggcggacgtgttcatgattccgcagtacgggtacctgacgctgaacaacgggagccaggccgtggggcgatcctccttctactgcctggagtactttccctcgcagatgctgagaacgggcaacaactttaccttcagctacaccttcgaggacgtgcccttccacagcagctacgcgcacagccagagcctggaccggctgatgaacccgctgattgaccagtacctgtactacctgtctcggactcagaccaacgggaccaatgccacgcagactctgttgtttgctcaggccgggcctcagaacatgtcggctcaggccaagaactggctgcctggtccttgctatcggcagcagcgcgtctctacgacagtgtcgcaaaacaacaacagcaactttacctggaccggggcgaccaagtaccacctgaacggccgagactccctggtgagccccggtgtcgccatggcaacgcacaaggacgacgaggagcgcttcttcccgagcagcggggtcctgatgtttggcaagcagggcgctggaaaggacaatgtcgagtacaccaacgtgatgctcaccagcgaggaggagatcaagaccaccaaccctgtggccacggagcagtacggcgtggtggctgacaatctgcagcagaccaactcagctcccattgtgggggcagtcaacagccagggggccttacccggtatggtctggcagaaccgggacgtgtacctgcagggtcccatctgggccaagatcccgcatacggacggcaactttcacccgtctcctctcatgggcggctttggactgaaacacccgcctccccagatcctgatcaaaaacacgccggtacctgcggatcccccggtgaactttacggacgctaagctggcgagtttcatcacgcagtacagcaccgggcaggtcagcgtggagattgagtgggagctgcagaaggagaacagcaagcgctggaatcccgagattcagtacacttccaattattataaatcagctaatgtggactttgccgtcaatgcagatggtgtatatagtgaaccccgccccattggcactcgttacctcacccgtaatctgtaa

SEQ ID NO: 383 - protein, 731 aa, Adeno-associated virus
MAADGYLPDWLEDNLSEGIREWWALKPGAPQPKANQQKQDDGRGLVLPGYKYLGPFNGLDKGEPVNEADAAALEHDKAYDQQLKAGDNPYLRYNHADAEFQERLQEDTSFGGNLGRAVFQAKKRVLEPLGLVEEGAKTAPGKKRPVEPDSSSGIGKSGQQPAKKRLNFGQTGDSESVPDPQPLSEPPAGPSGLGSGTMAAGGGAPMADNNEGADGVGNVSGNWHCDSTWLGDRVITTSTRTWALPTYNNHLYKQISNGTSGGSSNDNTYFGYSTPWGYFDFNRFHCHFSPRDWQRLINNNWGFRPKKLNFKLFNIQVKEVTQNEGTKTIANNLTSTVQVFTDSEYQLPYVLGSAHQGCLPPFPADVFMIPQYGYLTLNNGSQAVGRSSFYCLEYFPSQMLRTGNNFTFSYTFEDVPFHSSYAHSQSLDRLMNPLIDQYLYYLSRTQTNGTNATQTLLFAQAGPQNMSAQAKNWLPGPCYRQQRVSTTVSQNNNSNFTWTGATKYHLNGRDSLVSPGVAMATHKDDEERFFPSSGVLMFGKQGAGKDNVEYTNVMLTSEEEIKTTNPVATEQYGVVADNLQQTNSAPIVGAVNSQGALPGMVWQNRDVYLQGPIWAKIPHTDGNFHPSPLMGGFGLKHPPPQILIKNTPVPADPPVNFTDAKLASFITQYSTGQVSVEIEWELQKENSKRWNPEIQYTSNYYKSANVDFAVNADGVYSEPRPIGTRYLTRNL

SEQ ID NO: 384 - DNA, 2196 bp, Adeno-associated virus
atggctgctgacggttatcttccagattggctcgaggacaacctctctgagggcattcgcgagtggtgggcgctgaaacctggagccccgcaacccaaagccaaccagcaaaagcaggacgacggccggggtctggtgcttcctggctacaagtacctcggacccttcaacggactcgacaagggggagcccgtcaacgaggcggacgccgcggccctcgagcacgacaaggcctacgaccagcagctcaaagcgggtgacaatccgtacctgcggtataatcacgccgacgccgagtttcaagagcgtctgcaagaagatacgtcctttgggggcaacctcgggcgagcagtcttccaggccaaaaagagggtactcgagcctctgggtctggttgaggaaggcgctaagacggctcctggaaagaagcggccagtagaaccggactccagctcgggcatcggcaagtcaggccggcagcccgcgaaaaagagactgaattttgggcagactggcgactcagagtcagtgcctgacccccaacctctctcagaaccacccgcaggtccctctggtctgggatctggtacaatggctgcaggcggtggcgctccaatggcagacaataacgaaggcgccgacggagtgggtaatgcctcaggaaattggcattgcgattccacatggctgggcgaccgagtcatcaccaccagcactcggacctgggccctccccacctacaacaaccacctctacaagcaaatctccaacgggacctcgggaggcagcagcaacgacaacacctactttggctacagcaccccctgggggtattttgactttaacagattccactgccacttttcaccacgtgactggcagcgactcatcaacaacaactggggattccggcccaagaggctcaacttcaagctcttcaacatccaggtcaaggaggtcacccagaatgaaggcaccaagaccatcgccaataacctcaccagcacggtgcaggtctttacggactcgaagtaccagctcccgtacgtgctcggctctgcccaccagggctgcctgcctccgttcccggcggacgtgttcatgattccgcagtacgggtacctgacgctgaacaacgggagccaggccgtggggcgatcctccttctactgcctggagtactttccctcgcagatgctgagaacgggcaacaactttaccttcagctacaccttcgaggacgtgcccttccacagcagctacgcgcacagccagagcctggaccggctgatgaacccgctgattgaccagtacctgtactacctgtctcggactcagaccaacgggaccaatgccacgcagactctgttgtttgctcaggccgggcctcagaacatgtcggctcaggccaagaactggctgcctggtccttgctatcggcagcagcgcgtctctacgacagtgtcgcaaaacaacaacagcaactttacctggaccggggcgaccaagtaccacctgaacggccgagactccctggtgaaccccggtgtcgccatggcaacgcacaaggacgacgaggagcgcttcttcccgagcagcggggtcctgatgtttggcaagcagggcgctggaaaggacaatgtcgagtacaccaacgtgatgctcaccagcgaggaggagatcaagaccaccaaccctgtggccacggagcagtacggtgtggtggctgacaatctgcagcagaccaactcggctcccattgtgggggcagtcaacagccagggggccttacccggtatggtctggcagaaccgggacgtgtacctgcagggtcccatctgggccaagatcccgcatacggacggcaactttcacccgtctcctctcatgggcggctttggactgaaacacccgcctccccagatcctgatcaaaaacacgccggtacctgcggatcccccggtgaactttacggacgctaagctggcgagtttcatcacgcagtacagcaccgggcaggtcagcgtggagattgagtgggagctgcagaaggagaacagcaagcgctggaatcccgagattcagtacacttccaattattataaatcagctaatgtggactttgccgtcaatgcagatggtgtatatagtgaaccccgccccattggcactcgttacctcacccgtaatctgtaa

SEQ ID NO: 385 - protein, 731 aa, Adeno-associated virus
MAADGYLPDWLEDNLSEGIREWWALKPGAPQPKANQQKQDDGRGLVLPGYKYLGPFNGLDKGEPVNEADAAALEHDKAYDQQLKAGDNPYLRYNHADAEFQERLQEDTSFGGNLGRAVFQAKKRVLEPLGLVEEGAKTAPGKKRPVEPDSSSGIGKSGRQPAKKRLNFGQTGDSESVPDPQPLSEPPAGPSGLGSGTMAAGGGAPMADNNEGADGVGNASGNWHCDSTWLGDRVITTSTRTWALPTYNNHLYKQISNGTSGGSSNDNTYFGYSTPWGYFDFNRFHCHFSPRDWQRLINNNWGFRPKRLNFKLFNIQVKEVTQNEGTKTIANNLTSTVQVFTDSKYQLPYVLGSAHQGCLPPFPADVFMIPQYGYLTLNNGSQAVGRSSFYCLEYFPSQMLRTGNNFTFSYTFEDVPFHSSYAHSQSLDRLMNPLIDQYLYYLSRTQTNGTNATQTLLFAQAGPQNMSAQAKNWLPGPCYRQQRVSTTVSQNNNSNFTWTGATKYHLNGRDSLVNPGVAMATHKDDEERFFPSSGVLMFGKQGAGKDNVEYTNVMLTSEEEIKTTNPVATEQYGVVADNLQQTNSAPIVGAVNSQGALPGMVWQNRDVYLQGPIWAKIPHTDGNFHPSPLMGGFGLKHPPPQILIKNTPVPADPPVNFTDAKLASFITQYSTGQVSVEIEWELQKENSKRWNPEIQYTSNYYKSANVDFAVNADGVYSEPRPIGTRYLTRNL

SEQ ID NO: 386 - DNA, 2196 bp, Adeno-associated virus
atggctgctgacggttatcttccagattggctcgaggacaacctctctgagggcattcgcgagtggtgggcgctgaaacctggagccccgcaacccaaagccaaccagcaaaagcaggacgacggccggggtctggtgcttcctggctacaagtacctcggacccttcaacggactcgacaagggggagcccgtcaacgaggcggacgccgcggccctcgagcacgacaaggcctacgaccagcagctcaaagcgggtgacaatccgtacctgcggtataatcacgccgacgccgagtttcaagagcgtctgcaagaagatacgtcctttgggggcaacctcgggcgagcagtcttccaggccaaaaagagggtactcgagcctctgggtctggttgaggaaggcgctaagacggctcctggaaagaagcggccagtagaaccggactccagctcgggcatcggcaagtcaggccagcagcccgcgaaaaagagactgaattttgggccgactggcgactcagagtcagtgcctgacccccaacctctctcagaaccacctgcaggtccctctggtctgggatctggtacaatggctgcaggcggtggcgctccaatggcagacaataacgaaggcgccgacggagtgggtaatgtctcaggaaattggcattgcgattccacatggctgggcgaccgagtcatcaccaccagcactcggacctgggccctccccacctacaacaaccacctctacaagcaaatctccaacgggacctcgggaggcagcagcaacgacaacacctactttggctacagcaccccctgggggtattttgactttaacagattccactgccacttttcaccacgcgactggcagcgactcatcaacaacaactggggattccggcccaagaagctcaacttcaagctcttcaacatccaggtcaaggaggtcacccagaatgaaggcaccaagaccaccgccaataacctcaccagcacggtgcaggtctttacggactcggagtaccagctcccgtacgtgctcggctctgcccaccagggctgcctgcctccgttcccggcggacgtgttcatgattccgcagtacgggtacctgacgctgaacaacgggagccaggccgtggggcgatcctccttctactgcctggagtactttccctcgcagatgctgagaacgggcaacaactttaccttcagctacaccttcgaggacgtgcccttccacagcagctacgcgcacagccagagcctggaccggctgatgaacccgctgattgaccagtacctgtactacctgtctcggactcagaccaacgggaccaatgccacgcagactctgttgtttgctcaggccgggcctcagaacatgtcggctcaggccaagaactggctgcctggtccttgctatcggcagcagcgcgtctctacggcagtgtcgcaaaacaacaacagcaactttacctggaccggggcgaccaagtaccacctgaacggccgagactccctggtgaaccccggtgtcgccatggcaacgcacaaggacgacgaggagcgcttcttcccgagcagcggggtcctgatgtttggcaagcagggcgctggaaaggacaatgtcgagtacaccaacgtgatgctcaccagcgaggaggagatcaagaccaccaaccctgtggccacggagcagtacggtgtggtggctgacaatctgcagcagaccaactcggctcccattgtgggggcagtcaacagccagggggccttacccggtatggtctggcagaaccgggacgtgtacctgcagggtcccatctgggccaagatcccgcatacggacggcaactttcacccgtctcctctcatgggcggctttggactgaaacacccgcctccccagatcctgatcaaaaacacgccggtacctgcggatcccccggtgaactttacggacgctaagctggcgagtttcatcacgcagtacagcaccgggcaggtcagcgtggagattgagtgggagctgcagaaggagaacagcaagcgctggaatcccgagattcagtacacttccaattattataaatcagctaatgtggactttgccgtcaatgcagatggtgtatatagcgaaccccgccccattggcactcgttacctcacccgtaatctgtaa

SEQ ID NO: 387 - protein, 731 aa, Adeno-associated virus
MAADGYLPDWLEDNLSEGIREWWALKPGAPQPKANQQKQDDGRGLVLPGYKYLGPFNGLDKGEPVNEADAAALEHDKAYDQQLKAGDNPYLRYNHADAEFQERLQEDTSFGGNLGRAVFQAKKRVLEPLGLVEEGAKTAPGKKRPVEPDSSSGIGKSGQQPAKKRLNFGPTGDSESVPDPQPLSEPPAGPSGLGSGTMAAGGGAPMADNNEGADGVGNVSGNWHCDSTWLGDRVITTSTRTWALPTYNNHLYKQISNGTSGGSSNDNTYFGYSTPWGYFDFNRFHCHFSPRDWQRLINNNWGFRPKKLNFKLFNIQVKEVTQNEGTKTTANNLTSTVQVFTDSEYQLPYVLGSAHQGCLPPFPADVFMIPQYGYLTLNNGSQAVGRSSFYCLEYFPSQMLRTGNNFTFSYTFEDVPFHSSYAHSQSLDRLMNPLIDQYLYYLSRTQTNGTNATQTLLFAQAGPQNMSAQAKNWLPGPCYRQQRVSTAVSQNNNSNFTWTGATKYHLNGRDSLVNPGVAMATHKDDEERFFPSSGVLMFGKQGAGKDNVEYTNVMLTSEEEIKTTNPVATEQYGVVADNLQQTNSAPIVGAVNSQGALPGMVWQNRDVYLQGPIWAKIPHTDGNFHPSPLMGGFGLKHPPPQILIKNTPVPADPPVNFTDAKLASFITQYSTGQVSVEIEWELQKENSKRWNPEIQYTSNYYKSANVDFAVNADGVYSEPRPIGTRYLTRNL

SEQ ID NO: 388 - DNA, 4404 bp, Adeno-associated virus
atggctgccgatggttatcttccagattggctcgagggcaacctctctgagggcattcgcgagtggtgggacttgaaacctggagccccgaaacccaaagccaaccagcaaaagcaggacgacggccggggtctggtgcttcctggctacaggtacctcggacccttcaacggactcgacaagggagagccggtcaacgaggcagacgccgcggccctcgagcacgacaaggcctacgacaagcagctcgagcagggggacaacccgtacctcaagtacaaccacgccgacgccgagtttcaggagcgtcttcaagaagatacgtcttttgggggcaacctcgggcgagcagtcttccaggccaagaagcgggttctcgaacctctcggtctggttgaggaaggcgctaagacggctcctggaaagaagagacccatagaatcccccgactcctccacgggcatcggcaagaacggccagccgcccgctaaaaagaagctcaactttgggcagactggcgactcagagtcagtgcccgacccccaacctctcggagaacctcccgccgcgccctcaggtctgggatctggtacaatggctgcaggcggtggcgcaccaatggcagacaataacgaaggcgccgacggagtgggtaatgcctccggaaattggcattgcgattccacatggctgggcgacagagtcatcaccaccagcacccgcacctgggccctgcccacctacaacaaccacctctacaagcagatatcaagtcagagcggggctaccaacgacaaccacttcttcggctacagcaccccctggggctattttgacttcaacagattccactgccacttctcaccacgtgactggcagcgactcatcaacaacaactggggattccggcccagaaagctgcggttcaagttgttcaacatccaggtcaaggaggtcacgacgaacgacggcgttacgaccatcgctaataaccttaccagcacgattcaggtcttctcggactcggagtaccaactgccgtacgtcctcggctctgcgcaccagggctgcctccctccgttccctgcggacgtgttcatgattcctcagtacggatatctgactctaaacaacggcagtcagtctgtgggacgttcctccttctactgcctggagtactttccttctcagatgctgagaacgggcgataactttgaattcagctacacctttgaggaagtgcctttccacagcagctatgcgcacagccagagcctggaccggctgatgaatcccctcatcgaccagtacctgtactacctggcccggacccagagcactacggggtccacaagggagctgcagttccatcaggctgggcccaacaccatggccgagcaatcaaagaactggctgcccggaccctgttatcggcagcagagactgtcaaaaaacatagacagcaacaacaacagtaactttgcctggaccggggccactaaataccatctgaatggtagaaattcattaaccaacccgggcgtagccatggccaccaacaaggacgacgaggaccagttctttcccatcaacggagtgctggtttttggcaaaacgggggctgccaacaagacaacgctggaaaacgtgctaatgaccagcgaggaggagatcaaaaccaccaatcccgtggctacagaagaatacggtgtggtctccagcaacctgcaatcgtctacggccggaccccagacacagactgtcaacagccagggggctctgcccggcatggtctggcagaaccgggacgtgtacctgcagggtcccatctgggccaaaattcctcacacggacggcaactttcacccgtctcccctgatgggcggatttggactcaaacacccgcctcctcaaattctcatcaaaaacaccccggtacctgctaatcctccagaggtgtttactcctgccaagtttgcctcatttatcacgcagtacagcaccggccaggtcagcgtggagatcgagtgggaactgcagaaagaaaacagcaaacgctggaatccagagattcagtacacctcaaattatgccaagtctaataatgtggaatttgctgtcaacaacgaaggggtttatactgagcctcgccccattggcacccgttacctcacccgtaacctgtaaatggctgccgatggttatcttccagattggctcgaggacaacctctctgagggcattcgcgagtggtgggacttgaaacctggagccccgaaacccaaagccaaccagcaaaagcaggacgacggccggggtctggtgcttcctggctacaagtacctcggacccttcaacggactcgacaagggggagcccgtcaacgcggcggacgcagcggccctcgagcacgacaaggcctacgaccagcagctcaaagcgggtgacaatccgtacctgcggtataaccacgccgacgccgagtttcaggagcgtctgcaagaagatacgtcttttgggggcaacctcgggcgagcagtcttccaggccaagaagcgggttctcgaacctctcggtctggttgaggaaggcgctaagacggctcctggaaagaagagaccggtagagccatcaccccagcgttctccagactcctctacgggcatcggcaagaaaggccagcagcccgcgaaaaagagactcaactttgggcagactggcgactcagagtcagtgcccgaccctcaaccaatcggagaaccccccgcaggcccctctggtctgggatctggtacaatggctgcaggcggtggcgctccaatggcagacaataacgaaggcgccgacggagtgggtagttcctcaggaaattggcattgcgattccacatggctgggcgacagagtcatcaccaccagcacccgaacctgggccctccccacctacaacaaccacctctacaagcaaatctccaacgggacttcgggaggaagcaccaacgacaacacctacttcggctacagcaccccctgggggtattttgactttaacagattccactgccacttctcaccacgtgactggcagcgactcatcaacaacaactggggattccggcccaagagactcaacttcaagctcttcaacatccaggtcaaggaggtcacgcagaatgaaggcaccaagaccatcgccaataaccttaccagcacgattcaggtctttacggactcggaataccagctcccgtacgtcctcggctctgcgcaccagggctgcctgcctccgttcccggcggacgtcttcatgattcctcagtacgggtacctgactctgaacaatggcagtcaggccgtgggccgttcctccttctactgcctggagtactttccttctcaaatgctgagaacgggcaacaactttgagttcagctaccagtttgaggacgtgccttttcacagcagctacgcgcacagccaaagcctggaccggctgatgaaccccctcatcgaccagtacctgtactacctgtctcggactcagtccacgggaggtaccgcaggaactcagcagttgctattttctcaggccgggcctaataacatgtcggctcaggccaaaaactggctacccgggccctgctaccggcagcaacgcgtctccacgacactgtcgcaaaataacaacagcaactttgcctggaccggtgccaccaagtatcatctgaatggcagagactctctggtaaatcccggtgtcgctatggcaacccacaaggacgacgaagagcgattttttccgtccagcggagtcttaatgtttgggaaacagggagctggaaaagacaacgtggactatagcagcgttatgctaaccagtgaggaagaaattaaaaccaccaacccagtggccacagaacagtacggcgtggtggccgataacctgcaacagcaaaacgccgctcctattgtaggggccgtcaacagtcaaggagccttacctggcatggtctggcagaaccgggacgtgtacctgcagggtcctatctgggccaagattcctcacacggacggaaactttcatccctcgccgctgatgggaggctttggactgaaacacccgcctcctcagatcctgattaagaatacacctgttcccgcggatcctccaactaccttcagtcaagctaagctggcgtcgttcatcacgcagtacagcaccggacaggtcagcgtggaaattgaatgggagctgcagaaagaaaacagcaaacgctggaacccagagattcaatacacttccaactactacaaatctacaaatgtggactttgctgttaacacagatggcacttattctgagcctcgccccatcggcacccgttacctcacccgtaatctgtaa

SEQ ID NO: 389 - protein, 738 aa, Adeno-associated virus; identical to SEQ ID NO: 7

SEQ ID NO: 390 - DNA, 3129 bp, Adeno-associated virus
gaattcgccctttctacggctgcgtcaactggaccaatgagaactttcccttcaacgattgcgtcgacaagatggtgatctggtgggaggagggcaagatgacggccaaggtcgtggagtccgccaaggccattctcggcggcagcaaagtgcgcgtggaccaaaagtgcaagtcgtccgcccagatcgaccccacccccgtgatcgtcacctccaacaccaacatgtgcgccgtgattgacgggaacagcaccaccttcgagcaccagcagccgttgcaggaccggatgttcaagtttgaactcacccgccgtctggagcacgactttggcaaggtgacaaagcaggaagtcagagagttcttccgctgggcgcaggatcacgtgaccgaggtggcgcacgagttctacgtcagaaagggtggagccaacaagagacccgcccccgatgacgcggataaaagcgagcccaagcgggcctgcccctcagtcgcggatccatcgacgtcagacgcggaaggagctccggtggactttgccgacaggtaccaaaacaaatgttctcgtcacgcgggcatgcttcagatgctgtttccctgcaaaacatgcgagagaatgaatcagaatttcaacatttgcttcacgcacgggaccagagactgttcagaatgtttccccggcgtgtcagaatctcaaccggtcgtcagaaaaaagacgtatcggaaactctgtgcgattcatcatctgctgggggcgggcacccgagattgcttgctcggcctgcgatctggtcaacgtggacctagatgactgtgtttctgagcaataaatgacttaaaccaggtatggctgccgatggttatcttccagattggctcgaggacaacctctctgagggcattcgcgagtggtgggacttgaaacctggagccccgaaacccaaagccaaccagcaaaagcaggacgacggccggggtctggtgcttcctggctacaagtacctcggacccttcaacggactcgacaagggggagcccgtcaacgcggcggacgcagcggccctcgagcacgacaaggcctacgaccagcagctcaaagcgggtgacaatccgtacctgcggtataaccacgccgacgccgagtttcaggagcgtctgcaagaagatacgtcttttgggggcaacctcgggcgagcagtcttccaggccaagaagcgggttctcgaacctctcggtctggttgaggaaggcgctaagacggctcctggaaagaagagaccggtagagccatcaccccagcgttctccagactcctctacgggcatcggcaagaaaggccagcagcccgcgaaaaagagactcaactttgggcagactggcgactcagagtcagtgcccgaccctcaaccaatcggagaaccccccgcaggcccctctggtctgggatctggtacaatggctgcaggcggtggcgctccaatggcagacaataacgaaggcgccgacggagtgggtagttcctcaggaaattggcattgcgattccacatggctgggcgacagagtcatcaccaccagcacccgaacctgggccctccccacctacaacaaccacctctacaagcaaatctccaacgggacttcgggaggaagcaccaacgacaacacctacttcggctacagcaccccctgggggtattttgactttaacagattccactgccacttctcaccacgtgactggcagcgactcatcaacaacaactggggattccggcccaagagactcaacttcaagctcttcaacatccaggtcaaggaggtcacgcagaatgaaggcaccaagaccatcgccaataaccttaccagcacgattcaggtctttacggactcggaataccagctcccgtacgtcctcggctctgcgcaccagggctgcctgcctccgttcccggcggacgtcttcatgattcctcagtacgggtacctgactctgaacaatggcagtcaggccgtgggccgttcctccttctactgcctggagtactttccttctcaaatgctgagaacgggcaacaactttgagttcagctaccagtttgaggacgtgccttttcacagcagctacgcgcacagccaaagcctggaccggctgatgaaccccctcatcgaccagtacctgtactacctgtctcggactcagtccacgggaggtaccgcaggaactcagcagttgctattttctcaggccgggcctaataacatgtcggctcaggccaaaaactggctacccgggccctgctaccggcagcaacgcgtctccacgacactgtcgcaaaataacaacagcaactttgcctggaccggtgccaccaagtatcatctgaatggcagagactctctggtaaatcccggtgtcgctatggcaacccacaaggacgacgaagagcgattttttccgtccagcggagtcttaatgtttgggaaacagggagctggaaaagacaacgtggactatagcagcgttatgctaaccagtgaggaagaaattaaaaccaccaacccagtggccacagaacagtacggcgtggtggccgataacctgcaacagcaaaacgccgctcctattgtaggggccgtcaacagtcaaggagccttacctggcatggtctggcagaaccgggacgtgtacctgcagggtcctatctgggccaagattcctcacacggacggaaactttcatccctcgccgctgatgggaggctttggactgaaacacccgcctcctcagatcctgattaagaatacacctgttcccgcggatcctccaactaccttcagtcaagctaagctggcgtcgttcatcacgcagtacagcaccggacaggtcagcgtggaaattgaatgggagctgcagaaagaaaacagcaaacgctggaacccagagattcaatacacttccaactactacaaatctacaaatgtggactttgctgttaacacagatggcacttattctgagcctcgccccatcggcacccgttacctcacccgtaatctgtaattgcttgttaatcaataaaccggttgattcgtttcagttgaactttggtctctgcgaagggcgaattc

SEQ ID NO: 391 - protein, 738 aa, Adeno-associated virus; identical to SEQ ID NO: 7

SEQ ID NO: 392 - protein, 733 aa, Adeno-associated virus
MAADGYLPDWLEDNLSEGIREWWDLRPGAPKPKANQQKQDDGRGLVLPGYKYLGPFNGLDKGEPVNEADAAALEHDKAYDKQLEQGDNPYLKYNHADAEFQERLQEDTSFGGNLGRAVFQAKKRVLEPLGLVEEGAKTAPGKKRPIESPDSSTGIGKKGQQPAKKRLNFGQTGDSESVPDPQPIGEPPAGPSGLGSGTMAAGGGAPMADNNEGADGVGSSSGNWHCDSTWLGDRVITTSTRTWALPTYNNHLYKQISNGTSGGSTNDNTYFGYSTPWGYFDFNRFHCHFSPRDWQRLINNNWGFRPKRLNFKLFNIQVKEVTQNEGTKTIANNLTSTIQVFTDSEYQLPYVLGSAHQGCLPPFPADVFMIPQYGYLTLNNGSQAVGRSSFYCLEYFPSQMLRTGNNFEFSYQFEDVPFHSSYAHSQSLDRLMNPLIDQYLYYLSRTQSTGGTAGTQQLLFSQAGPNNMSAQAKNWLPGPCYRQQRVSTTVSQNNNSNFAWTGATKYHLNGRDSLVNPGVAMATHKGDEERFFPSSGVLMFGKQGAGKDNVDYSSVMLTSEEEIKTTNPVATEQYGVVADNLQQQNAAPIVGAVNSQGALPGMVWQNRDVYLQGPIWAKIPHTDGNFHPSPLMGGFGLKHPPPQILIKNTPVPADPPTTFSQAKLASFITQYSTGQVSVEIEWELQKENSKRWNPEIQYTSNYYKSTNVDFAVNTEGTYSEPRPIGTRYLTRNL

SEQ ID NO: 393 - DNA, 2501 bp, Adeno-associated virus
gaattcgcccttggctgcgtcaactggaccaatgagaactttcccttcaacgattgcgtcgacaagatggtgatctggtgggaggagggcaagatgacggccaaggtcgtggagtccgccaaggccattcatcatctgctggggcgggctcccgagattgcttgctcggcctgcgatctggtcaacgtggacctggatgactgtgtttctgagcaataaatgacttaaaccaggtatggctgccgatggttatcttccagattggctcgaggacaacctctctgagggcattcgcgagtggtgggacttgagacctggagccccgaaacccaaagccaaccagcaaaagcaggacgacggccggggtctggtgcttcctggctacaagtacctcggacccttcaacggactcgacaagggagagccggtcaacgaggcagacgccgcggccctcgagcacgacaaggcctacgacaagcagctcgagcagggggacaacccgtacctcaagtacaaccacgccgacgccgagtttcaggagcgtcttcaagaagatacgtcttttgggggcaacctcgggcgagcagtcttccaggccaagaagcgggttctcgaacctctcggtctggttgaggaaggcgctaagacggctcctggaaagaagagacccatagaatcccccgactcctccacgggcatcggcaagaaaggccagcagcccgctaaaaagagactcaactttgggcagactggcgactcagagtcagtgcccgaccctcaaccaatcggagaaccccccgcaggcccctctggtctgggatctggcacaatggctgcaggcggtggcgctccaatggcagacaataacgaaggcgccgacggagtgggtagttcctcaggaaattggcattgcgattccacatggctgggcgacagagtcatcaccaccagcacccgaacctgggccctccccacctacaacaaccacctctacaagcaaatctccaacgggacatcgggaggaagcaccaacgacaacacctacttcggctacagcaccccctgggggtattttgactttaacagattccactgccacttctcaccacgtgactggcagcgactcatcaacaacaactggggattccggcccaagagactcaacttcaagctcttcaacatccaggtcaaggaggtcacgcagaatgaaggcaccaagaccatcgccaataaccttaccagcacgattcaggtctttacggactcggaataccagctcccgtacgtcctcggctctgcgcaccagggctgcctgcctccgttcccggcggacgtcttcatgattcctcagtacgggtacctgactctgaacaacggcagtcaggccgtgggccgttcctccttctactgcctggagtactttccttctcaaatgctgagaacgggcaacaactttgagttcagctaccagtttgaggacgtgccttttcacagcagctatgcgcacagccaaagcctggaccggctgatgaaccccctcatcgaccagtacctgtactacctgtctcggactcagtccacgggaggtaccgcaggaactcagcagttgctattttctcaggccgggcctaataacatgtcggctcaggccaaaaactggctacccgggccctgctaccggcagcaacgcgtctccacgacagtgtcgcaaaataacaacagcaactttgcttggaccggtgccaccaagtatcatctgaatggcagagactctctggtaaatcccggtgtcgctatggcaacgcacaagggcgacgaagagcgattttttccatccagcggagtcttgatgtttgggaaacagggagctggaaaagacaacgtagactatagcagcgttatgctaaccagtgaggaagaaatcaaaaccaccaacccagtggccacagaacagtacggcgtggtggccgataacctgcaacagcaaaacgccgctcctattgtaggggccgtcaacagtcaaggagccttacctggcatggtctggcagaaccgggacgtgtacctgcagggtcctatctgggccaagattcctcacacggacggcaactttcatccttcgccgctgatgggaggctttggactgaaacacccgcctcctcagatcctgattaagaatacacctgttcccgcggatcctccaactaccttcagtcaagccaagctggcgtcgttcatcacgcagtacagcaccggacaggtcagcgtggaaattgaatgggagctgcagaaagagaacagcaagcgctggaacccagagattcagtatacttccaactactacaaatctacaaatgtggactttgctgtcaatactgagggtacttattcagagcctcgccccattggcacccgttacctcacccgtaacctgtaattgcctgttaatcaataaaccggttgattcgtttcagttgaactttggtctcaagggcgaattc

SEQ ID NO: 394 - DNA, 2187 bp, Adeno-associated virus
atggctgccgatggttatcttccagattggctcgaggacaacctctctgagggcattcgcgagtggtgggacttgaaacctggagccccgaaacccaaagccaaccagcaaaagcaggacgacggccggggtctggtgcttcctggctacaagtacctcggacccttcaacggactcgacaagggagagccggtcaacgaggcagacgccgcggccctcgagcacgacaaggcctacgacaagcagctcgagcagggggacaacccgtacctcaagtacaaccacgccgacgccgagtttcaggagcgtcttcaagaagatacgtcttttgggggcaacctcgggcgagcagtcttccaggccaagaagcgggttctcgaacctctcggtctggttgaggaaggcgctaagacggctcctggaaagaagagacccatagaatcccccgactcctccacgggcatcggcaagaaaggccagcagcccgctaaaaagaagctcaactttgggcagactggcgactcagagtcagtgcccgacccccaacctctcggagaacctcccgccgcgccctcaggtctgggatctggtacaatggctgcaggcggtggcgcaccaatggcagacaataacgaaggcgccgacggagtgggtaatgcctccggaaattggcattgcgattccacatggctgggcgacagagtcatcaccaccagcacccgcacctgggccctgcccacctacaacaaccacctctacaagcagatatcaagtcagagcggggctaccaacgacaaccacttcttcggctacagcaccccctggggctattttgacttcaacagattccactgccacttctcaccacgtgactggcagcgactcatcaacaacaactggggattccggcccagaaagctgcggttcaagttgttcaacatccaggtcaaggaggtcacgacgaacgacggcgttacgaccatcgctaataaccttaccagcacgattcaggtcttctcggactcggagtaccaactgccgtacgtcctcggctctgcgcaccagggctgcctccctccgttccctgcggacgtgttcatgattcctcagtacggatatctgactctaaacaacggcagtcagtctgtgggacgttcctccttctactgcctggagtactttccttctcagatgctgagaacgggcaataactttgaattcagctacacctttgaggaagtgcctttccacagcagctatgcgcacagccagagcctggaccggctgatgaatcccctcatcgaccagtacctgtactacctggcccggacccagagcactacggggtccacaagggagctgcagttccatcaggctgggcccaacaccatggccgagcaatcaaagaactggctgcccggaccctgttatcggcagcagagactgtcaaaaaacatagacagcaacaacaacagtaactttgcctggaccggggccactaaataccatctgaatggtagaaattcattaaccaacccgggcgtagccatggccaccaacaaggacgacgaggaccagttctttcccatcaacggagtgctggtttttggcgaaacgggggctgccaacaagacaacgctggaaaacgtgctaatgaccagcgaggaggagatcaaaaccaccaatcccgtggctacagaagaatacggtgtggtctccagcaacctgcaatcgtctacggccggaccccagacacagactgtcaacagccagggggctctgcccggcatggtctggcagaaccgggacgtgtacctgcagggtcccatctgggccaaaattcctcacacggacggcaactttcacccgtctcccctgatgggcggatttggactcaaacacccgcctcctcaaattctcatcaaaaacaccccggtacctgctaatcctccagaggtgtttactcctgccaagtttgcctcatttatcacgcagtacagcaccggccaggtcagcgtggagatcgagtgggaactgcagaaagaaaacagcaaacgctggaatccagagattcagtacacctcaaattatgccaagtctaataatgtggaatttgctgtcaacaacgaaggggtttatactgagcctcgccccattggcacccgttacctcacccgtaacctgtaa

SEQ ID NO: 395 - protein, 728 aa, Adeno-associated virus; identical to SEQ ID NO: 63

SEQ ID NO: 396 - protein, 728 aa, Adeno-associated virus; identical to SEQ ID NO: 155

SEQ ID NO: 397 - protein, 728 aa, Adeno-associated virus; identical to SEQ ID NO: 155

SEQ ID NO: 398 - protein, 733 aa, Adeno-associated virus
MAADGHLPDWLEDNLSEGIREWWDLKPGAPKPKANQQKQDDGRGLVLPGYKYLGPFNGLDKGEPVNAADAAALEHDKAYDQQLKAGDNPYLRYNHADAEFQERLQEDTSFGGNLGRAVFQAKKRVLEPLGLVEEGAKTAPGKKRPIESPDSSTGIGKKGQQPAKKKLNFGQTGDSESVPDPQPIGEPPAGPSGLGSGTMAAGGGAPMADNNEGADGVGSSSGNWHCDSTWLGDRVITTSTRTWALPTYNNHLYKQISNGTSGGSTNDNTYFGYSTPWGYFDFNRFHCHFSPRDWQRLINNSWGFRPKRLNFKLFNIQVKEVTQNEGTKTIANNLTSTIQVFTDSEYQLPYVLGSAHQGCLPPFPADVFMIPQYGYLTLNNGSQAVGRSSFYCLEYFPSQMLRTGNNFEFSYQFEDVPFHSSYAHSQSLDRLMNPLIDQYLYYLSRTQSTGGTAGTQQLLFSQAGPNNMSAQAKNWLPGPCYRQQRVSTTLSQNNNSNFAWTGATKYHLNGRDSLVNPGVAMATHKDDEERFFPSSGVLMFGKQGAGKDNVDYSSVMLTSEEEIKTTNPVATEQYGVVADNLQQQNAAPIVGAVNSQGALPGMVWQNRDVYLQGPIWAKIPHTDGNFHPSPLMGGFGLKHPPPQILIKNTPVPADPPTTFSQAKLASFITQYSTGQVSVEIEWELQKENSKRWNPEIQYTSNYYKSTNVDFAVNTEGTYSEPRPIGTRYLTRNL

SEQ ID NO: 399 - DNA, 3113 bp, Adeno-associated virus
gaattcgccctttctacggctgcgtcaactggaccaatgagaactttcccttcaacgattgcgtcgacaagatggtgatctggtgggaggagggcaagatgacggccaaggtcgtggagtccgccaaggccattctcggcggcagcaaggtgcgcgtggaccaaaagtgcaagtcgtccgcccagatcgatcccacccccgtgatcgtcacttccaacaccaacatgtgcgccgtgattgacgggaacagcaccaccttcgagcaccagcagccgttacaagaccggatgttcaaatttgaactcacccgccgtctggagcatgactttggcaaggtgacaaagcaggaagtcaaagagttcttccgctgggcgcaggatcacgtgaccgaggtggcgcatgagttctacgtcagaaagggtggagccaacaagagacccgcccccgatgacgcggataaaagcgagcccaagcgggcctgcccctcagtcgcggatccatcgacgtcagacgcggaaggagctccggtggactttgccgacaggtaccaaaacaaatgttctcgtcacgcgggcatgcttcagatgctgcttccctgcaagacatgcgagagaatgaatcagaatttcagcatttgcttcacgcacgggaccagagactgttcagaatgtttccccggcgtgtcagaatctcaaccggtcgtcagaaagaggacgtatcggaaactctgtgccattcatcatctgctggggcgggctcccgagattgcttgctcggcctgcgatctggtcaacgtggacctggatgactgtgtttctgagcaataaatgacttaaaccaggtatggctgccgatggtcatcttccagattggctcgaggacaacctctctgagggcattcgcgagtggtgggacttgaaacctggagccccgaaacccaaagccaaccagcaaaagcaggacgacggccggggtctggtgcttcctggctacaagtacctcggacccttcaacggactcgacaagggggagcccgtcaacgcggcggacgcagcggccctcgagcacgacaaggcctacgaccagcagctcaaagcgggtgacaatccgtacctgcggtataaccacgccgacgccgagtttcaggagcgtcttcaagaagatacgtcttttgggggcaacctcgggcgagcagtcttccaggccaagaagcgggttctcgaacctctcggtctggttgaggaaggcgctaagacggctcctggaaagaagagacccatagaatcccccgactcctccacgggcatcggcaagaaaggccagcagcccgctaaaaagaagctcaactttgggcagactggcgactcagagtcagtgcccgaccctcaaccaatcggagaaccccccgcaggcccctctggtctgggatctggtacaatggctgcaggcggtggcgctccaatggcagacaataacgaaggcgccgacggagtgggtagttcctcaggaaattggcattgcgattccacatagctgggcgacagagtcatcaccaccagcacccgaacctgggccctccccacctacaacaaccacctctacaagcaaatctccaacgggacatcgggaggaagcaccaacgacaacacctacttcggctacagcaccccctgggggtattttgactttaacagattccactgccacttctcaccacgtgactggcagcgactcatcaacaacagctggggattccggcccaagagactcaacttcaagctcttcaacatccaggtcaaggaggtcacgcagaatgaaggcaccaagaccatcgccaataaccttaccagcacgattcaggtctttacggactcggaataccagctcccgtacgtcctcggctctgcgcaccagggctgcctgcctccgttcccggcggacgtcttcatgattcctcagtacgggtacctgactctgaacaacggcagtcaggccgtgggccgttcctccttctactgcctggagtactttccttctcaaatgctgagaacgggcaacaactttgagttcagctaccagtttgaggacgtgccttttcacagcagctacgcgcacagccaaagcctggaccggctgatgaaccccctcatcgaccagtacctgtactacctgtctcggactcagtccacgggaggtaccgcaggaactcagcagttgctattttctcaggccgggcctaataacatgtcggctcaggccaaaaactggctacccgggccctgctaccggcagcaacgcgtctccacgacactgtcgcaaaataacaacagcaactttgcttggaccggtgccaccaagtatcatctgaatggcagagactctctggtaaatcccggtgtcgctatggcaacgcacaaggacgacgaagagcgattttttccatccagcggagtcttgatgtttgggaaacagggagctggaaaagacaacgtggactatagcagcgttatgctaaccagtgaggaagaaatcaaaaccaccaacccagtggccacagaacagtacggcgtggtggccgataacctgcaacagcaaaacgccgctcctattgtaggggccgtcaacagtcaaggagccttacctggcatggtctggcagaaccgggacgtgtacctgcagggtcctatctgggccaagattcctcacacggacggcaactttcatccttcgccgctgatgggaggctttggactgaaacacccgcctcctcagatcctgattaagaatacacctgttcccgcggatcctccaactaccttcagtcaagccaagctggcgtcgttcatcacgcagtacagcaccggacaggtcagcgtggaaattgaatgggagctgcagaaagagaacagcaagcgctggaacccagagattcagtatacttccaactactacaaatctacaaatgtggactttgctgtcaatactgagggtacttattcagagcctcgccccattggcacccgttacctcacccgtaacctgtaattgcctgttaatcaataaaccggttaattcgtttcagttgaactttggtctctgcgaagggcgaattc

SEQ ID NO: 400 - protein, 731 aa, Adeno-associated virus
MAADGYLPDWLEDNLSEGIREWWDLKPGAPKPKANQQKQDDGRGLVLPGYKYLGPFNGLDKGEPVNEADAAALEHDKAYDKQLEQGDNPYLKYNHADAEFQERLQEDTSFGGNLGRAVFRAKKRVLEPLGLVEEGAKTAPGKKRPIESPDSSTGIGKKGQQPAKKKLNFGQTGDSESVPDPQPLGEPPAAPSGLGSGTMAAGGGAPMADNNEGADGVGNASGNWHCDSTWLGDRVITTSTRTWALPTYNNHLYKQISSQSGATNDNHFFGYSTPWGYFDFNRFHCHFSPRDWQRLINNNRGFRPRKLRFKLFNIQVKEVTTNDGVTTIANNLTSTIQVFSDSEYQLPYVLGSAHQGCLPPFPADVFMIPQYGYLTLNNGSQSVGRSSFYCLEYFPSQMLRTGNNFEFSYQFEDVPFHSSYAHSQSLDRLMNPLIDQYLYYLSRTQSTGGTAGTQQLLFSQAGPNNMSAQAKNWLPGPCYRQQRVSTTLSQNNNSNFAWTGATKYHLNGRDSLVNPGVAMATHKDDEERFFPSSGVLMFGKQGAGKDNVDYSSVMLTSEEEIKTTNPVATEQYGVVADNLQQQNAAPIVGAVNSQGALPGMAWQNRDVYLQGPIWAKIPHTDGNFHPSPLMGGFGLKHPPPQILIKNTPVPADPPTTFSQAKLASFITQYSTGQVSVEIEWELQKENSKRWNPEIQYTSNYYKSTNVDFAVNTEGTYSEPRPIGTRYLTRNL

SEQ ID NO: 401 - DNA, 3106 bp, Adeno-associated virus
gaattcgcccttctacggctgcgtcaactggaccaatgagaactttcccttcaacgattgcgtcgacaagatggtgatctggtgggaggagggcaagatgacggccaaggtcgtggagtccgccaaggccattctcggcggcagcaaggtgcgcgtggaccaaaagtgcaagtcgtccgcccagatcgaccccacccccgtgatcgtcacctccaacaccaacatgtgcgccgtgattgacgggaacagcaccaccttcgagcaccagcagccgttgcaggaccggatgttcaaatttgaactcacccgccgtctggagcatgactttggcaaggcgacaaagcaggaagtcaaagagttcttccgctgggcgcaggatcacgtgaccgaggtggcgcatgagttctacgtcagaaagggtggagccaacaagagacccgcccccgatgacgcggataaaagcgagcccaagcgggcccgcccctcagtcgcggatccatcgacgtcagacgcggaaggagctccggtggactttgccgacaggtaccaaaacaaatgttctcgtcacgcgggcatgcttcagatgctgtttccctgcaaaacatgcgagagaatgaatcagaatttcaacatttgcttcacgcacgggaccagagactgttcagaatgtttccccggcgtgtcagaatctcaaccggtcgtcagaaagaggacgtatcggaaactctgtgccattcatcatctgctggggcgggctcccgagattgcttgctcggcctgcgatctggtcaacgtggacctggatgactgtgtttctgagcaataaatgacttaaaccaggtatggctgccgatggttatcttccagattggctcgaggacaacctctctgagggcattcgcgagtggtgggacttgaaacctggagccccgaaacccaaagccaaccagcaaaagcaggacgacggccggggtctggtgcttcctggctacaagtacctcggacccttcaacggactcgacaagggagagccggtcaacgaggcagacgccgcggccctcgagcacgacaaggcctacgacaagcagctcgagcagggggacaacccgtacctcaagtacaaccacgccgacgccgagtttcaggagcgtcttcaagaagatacgtcttttgggggcaacctcgggcgagcagtcttccgggccaagaagcgggttctcgaacctctcggtctggttgaggaaggcgctaagacggctcctggaaagaagagacccatagaatcccccgactcctccacgggcatcggcaagaaaggccagcagcccgctaaaaagaagctcaactttgggcagactggcgactcagagtcagtgcccgacccccaacctctcggagaacctcccgccgcgccctcaggtctgggatctggtacaatggctgcaggcggtggcgcaccaatggcagacaataacgaaggcgccgacggagtgggtaatgcctccggaaattggcattgcgattccacatggctgggcgacagagtcatcaccaccagcacccgcacctgggccctgcccacctacaacaaccacctctacaagcagatatcaagtcagagcggggctaccaacgacaaccacttcttcggctacagcaccccctggggctattttgacttcaacagattccactgccacttctcaccacgtgactggcagcgactcatcaacaacaaccggggattccggcccagaaagctgcggttcaagttgttcaacatccaggtcaaggaggtcacgacgaacgacggcgttacgaccatcgctaataaccttaccagcacgattcaggtcttctcggactcggagtaccaactgccgtacgtcctcggctctgcgcaccagggctgcctccctccgttccctgcggacgtgttcatgattcctcagtacggatatctgactctaaacaacggcagtcagtctgtgggacgttcctccttctactgcctggagtactttccttctcagatgctgagaacgggcaataactttgaattcagctaccagtttgaggacgtgccctttcacagcagctacgcgcacagccaaagcctggaccggctgatgaaccccctcatcgaccagtacctgtactacctgtctcggactcagtccacgggaggtaccgcaggaactcagcagttgctattttctcaggccgggcctaataacatgtcggctcaggccaaaaactggctacccgggccctgctaccggcagcaacgcgtctccacgacactgtcgcaaaataacaacagcaactttgcttggaccggtgccaccaagtatcatctgaatggcagagactctctggtaaatcccggtgtcgctatggcaacgcacaaggacgacgaagagcgattttttccatccagcggagtcttgatgtttgggaaacagggagctggaaaagacaacgtggactatagcagcgttatgctaaccagtgaggaagaaatcaaaaccaccaacccagtggccacagaacagtacggcgtggtggccgataacctgcaacagcaaaacgccgctcctattgtaggggccgtcaacagtcaaggagccttacctggcatggcctggcagaaccgggacgtgtacctgcagggtcctatctgggccaagattcctcacacggacggcaactttcatccttcgccgctgatgggaggctttggactgaaacacccgcctcctcagatcctgattaagaatacacctgttcccgcggatcctccaactaccttcagtcaagccaagctggcgtcgttcatcacgcagtacagcaccggacaggtcagcgtggaaattgaatgggagctgcagaaagagaacagcaagcgctggaacccagagattcagtatacttccaactactacaaatctacaaatgtggactttgctgtcaatactgagggtacttattcagagcctcgccccattggcacccgttacctcacccgtaacctgtaattgcctgttaatcaataaaccggttaattcgtttcagttgaactttggtctctgcgaagggcgaattc

SEQ ID NO: 402 - protein, 738 aa, Adeno-associated virus
MAADGYLPDWLEDNLSEGIREWWDLKPGAPKPKANQQKQDDGRGLVLPGYKYLGPFNGLDKGEPVNEADAAALEHDKAYDKQLEQGDNPYLKYNHADAEFQERLQEDTSFGGNLGRAVFQAKKRVLEPLGLVEEGAKTAPGKKRPVEPSPQRSPDSSTGIGKTGQQPAKKRLNFGQTGDSESVPDPQPIGEPPAGPSGLGSGTMAAGGGAPMADNNEGADGVGSSSGNWHCDSTWLGDRVITTSTRTWALPTYNNHLYKQISNGTSGGSTNDNTYFGYSTPWGYFDFNRFHCHFSPRDWQRLINNNWGFRPKRLNFKLFNIQVKEVTQNEGTKTIANNLTSTIQVFTDSEYQLPYVLGSAHQGCLPPFPADVFMIPQYGYLTLNNGSQAVGRSSFYCLEYFPSQMLRTGNNFEFSYQFEDVPFHSSYAHSQSLDRLMNPLIDQYLYYLSRTQSTGGTAGTQQLLFSQAGPNNMSAQAKNWLPGPCYRQQRVSTTLSQNNNSNFAWTGATKYHLNGRDSLVNPGVAMATHKDDEERFFPSSGVLMFGKQGAGKDNVDYSSVMLTSEEEIKTTNPVATEQYGVVADNLQQQNAAPIVGAVNSQGALPGMVWQNRDVYLQGPIWAKIPHTDGNFHPSPLMGGFGLKHPPPQILIKNTPVPADPPTTFSQAKLASFITQYSTGQVSVEIEWELQKENSKRWNPEIQYTSNYYKSTNVDFAVNTEGTYSEPRPIGTRYLTRNL

SEQ ID NO: 403 - DNA, 3197 bp, Adeno-associated virus
gaattcgccctttctacggctgcgtcaactggaccaatgagaactttcccttcaacgattgcgtcgacaagatggtgatctggtgggaggagggcaagatgacggccaaggtcgtggagtccgccaaggccattctcggcggcagcaaggtgcgcgtggaccaaaagtgcaagtcgtccgcccagatcgaccccacccccgtgatcgtcacctccaacaccaacatgtgcgccgtgattgacgggaacagcaccaccttcgagcaccagcagccgttacaagaccggatgttcaaatttgaactcacccgccgtctggagcacgactttggcaaggtgacaaagcaggaagtcaaagagttcttccgctgggcgcaggatcacgtgaccgaggtggcgcatgagttctacgtcagaaagggtggagccaacaagagacccgcccccgatgacgcggataaaagcgagcccaagcgggcctgcccctcagtcgcggatccatcgacgtcagacgcggaaggagctccggtggactttgccgacaggtaccaaaacaaatgttctcgtcacgcgggcatgcttcagatgctgtttccctgcaagacatgcgagagaatgaatcagaatttcaacatttgcttcacgcacgggaccagagactgttcagaatgtttccccggcgtgtcagaatctcaaccggtcgtcagaaagaggacgtatcggaaactctgtgccattcatcatctgctggggcgggctcccgagattgcttgctcggcctgcgatctggtcaacgtggacctggatgactgtgtttctgagcaataaatgacttaaaccaggtatggctgccgatggttatcttccagattggctcgaggacaacctctctgagggcattcgcgagtggtgggacttgaaacctggagccccgaaacccaaagccaaccagcaaaagcaggacgacggccggggtctggtgcttcctggctacaagtacctcggacccttcaacggactcgacaagggagagccggtcaacgaggcagacgccgcggccctcgagcacgacaaggcctacgacaagcagctcgagcagggggacaacccgtacctcaagtacaaccacgccgacgccgagtttcaggagcgtcttcaagaagatacgtcttttgggggcaacctcgggcgagcagtcttccaggccaagaagcgggttctcgaacctctcggtctggttgaggaaggcgctaagacggctcctggaaagaagagaccggtagagccatcaccccagcgttctccagactcctctacgggcatcggcaagacaggccagcagcccgcgaaaaagagactcaactttgggcagactggcgactcagagtcagtgcccgaccctcaaccaatcggagaaccccccgcaggcccctctggtctgggatctggtacaatggctgcaggcggtggcgctccaatggcagacaataacgaaggcgccgacggagtgggtagttcctcaggaaattggcattgcgattccacatggctgggcgacagagtcatcaccaccagcacccgaacctgggccctccccacctacaacaaccacctctacaagcaaatctccaacgggacatcgggaggaagcaccaacgacaacacctacttcggctacagcaccccctgggggtattttgactttaacagattccactgccacttctcaccacgtgactggcagcgactcatcaacaacaactggggattccggcccaagagactcaacttcaagctcttcaacatccaggtcaaggaggtcacgcagaatgaaggcaccaagaccatcgccaataaccttaccagcacgattcaggtctttacggactcggaataccagctcccgtacgtcctcggctctgcgcaccagggctgcctgcctccgttcccggcggacgtcttcatgattcctcagtacgggtacctgactctgaacaacggcagtcaggccgtgggccgttcctccttctactgcctggagtactttccttctcaaatgctgagaacgggcaacaactttgagttcagctaccagtttgaggacgtgccttttcacagcagctacgcgcacagccaaagcctggaccggctgatgaaccccctcatcgaccagtacctgtactacctgtctcggactcagtccacgggaggtaccgcaggaactcagcagttgctattttctcaggccgggcctaataacatgtcggctcaggccaaaaactggctacccgggccctgctaccggcagcaacgcgtctccacgacactgtcgcaaaataacaacagcaactttgcttggaccggtgccaccaagtatcatctgaatggcagagactctctggtaaatcccggtgtcgctatggcaacgcacaaggacgacgaagagcgattttttccatccagcggagtcttgatgtttgggaaacagggagctggaaaagacaacgtggactatagcagcgttatgctaaccagtgaggaagaaatcaaaaccaccaacccagtggccacagaacagtacggcgtggtggccgataacctgcaacagcaaaacgccgctcctattgtaggggccgtcaacagtcaaggagccttacctggcatggtctggcagaaccgggacgtgtacctgcagggtcctatctgggccaagattcctcacacggacggcaactttcatccttcgccgctgatgggaggctttggactgaaacacccgcctcctcagatcctgattaagaatacacctgttcccgcggatcctccaactaccttcagtcaagccaagctggcgtcgttcatcacgcagtacagcaccggacaggtcagcgtggaaattgaatgggagctgcagaaagagaacagcaagcgctggaacccagagattcagtatacttccaactactacaaatctacaaatgtggactttgctgtcaatactgagggtacttattcagagcctcgccccattggcacccgttacctcacccgtaacctgtaattgcctgttaatcaataaaccggttaattcgtttcagttgaactttggtctctgcgaagggcgaattcgtttaaacctgcaggactagtccctttagtgagggttaattctgagcttggcgtaatcatgggtcatag

SEQ ID NO: 404 - protein, 735 aa, Adeno-associated virus
MAADGYLPDWLEDNLSEGIREWWDLKPGAPKPKANQQKQDDGRGLVLPGYKYLGPFNGLDKGEPVNEADAAALEHDKAYDKQLEQGDNPYLKYNHADAEFQERLQEDTSFGGNLGRAVFQAKKRVLEPLGLVEEGAKTAPGKKRPVEPSPQRSPDSSTGIGKTGQQPAKKRLNFGQTGDSESVPDPQPIGEPPAGPSGLGSGTMAAGGGAPMADNNEGADGVGSSSGNWHCDSTWLGDRVITTSTRTWALPTYNNHLYKQISNGTSGGSTNDNTYFGYSTPWGYFDFNRFHCHFSPRDWQRLINNNWGFRPRKLRFKLFNIQVKEVTTDDGVTTIANNLTSTIQVFSDSEYQLPYVLGSAHQGCLPPFPADVFMIPQYGYLTLNNGSQSVGRSSFYCLEYFPSQMLRTGNNFEFSYTFEEVPFHSSYAHSQSLDRLMNPLIDQYLYYLARTQSTTGSTRELQFHQAGPNTMAEQSKNWLPGPCYRQQRLSKNIDSNNNSNFAWTGATKYHLNGRNSLTNPGVAMATNKDDEDQFFPINGVLVFGKTGAANKTTLENVLMTSEEEIKTTNPVATEEYGVVSSNLQSSTAGPQTQTVNSQGALPGMVWQNRDVYLQGPIWAKIPHTDGNFHPSPLMDGFGLKHPPPQILIKNTPVPANPPEVFTPAKFASFITQYSTGQVSVEIEWELQKENSKRWNPEIQYTSNYAKSNNVEFAVNNEGVYTEPRPIGTRYLTRNL

SEQ ID NO: 405 - DNA, 3276 bp, Adeno-associated virus
gaattcgcccttcgcagagaccaaagttcaactgaaacgaattaaccggtttattgattaacaggcaattacaggttacgggtgaggtaacgggtgccaatggggcgaggctcagtataaaccccttcgttgttgacagcaaattccacattattagacttggcataatttgaggtgtactgaatctctggattccagcgtttgctgttttctttctgcagttcccactcgatctccacgctgacctggccggtgctgtactgcgtgataaatgaggcaaacttggcaggagtaaacacctctggaggattagcaggtaccggggtgtttttgatgagaatttgaggaggcgggtgtttgagtccaaatccgtccatcaggggagacgggtgaaagttgccgtccgtgtgaggaattttggcccagatgggaccctgcaggtacacgtcccggttctgccagaccatgccgggcagagccccctggctgttgacagtctgtgtctggggtccggccgtagacgattgcaggttgctggagaccacaccgtattcttctgtagccacgggattggtggttttgatctcctcctcgctggtcattagcacgttttccagcgttgtcttgttggcagcccccgttttgccaaaaaccagcactccgttgatgggaaagaactggtcctcgtcgtccttgttggtggccatggctacgcccgggttggttaatgaatttctaccattcagatggtatttagtggccccggtccaggcaaagttactgttgttgttgctgtctatgttttttgacagtctctgctgccgataacagggtccgggcagccagttctttgattgctcggccatggtgttgggcccagcctgatggaactgcagctcccttgtggaccccgtagtgctctgggtccgggccaggtagtacaggtactggtcgatgaggggattcatcagccggtccaggctctggctatgcgcatagctgctgtggaaaggcacttcctcaaaggtgtagctgaattcaaagttattgcccgttctcagcatctgagaaggaaagtactccaggcagtagaaggaggaacgtcccacagactgactgccgttgtttagagtcagatatccgtactgaggaatcatgaacacgtccgcagggaacggagggaggcagccctggtgcgcagagccgaggacgtacggcagttggtactccgagtccgagaagacctgaatcgtgctggtaaggttattagcgatggtcgtaacgccgtcgtccgtcgtgacctccttgacctggatgttgaacaacttgaaccgcagctttctgggccggaatccccagttgttgttgatgagtcgctgccagtcacgtggtgagaagtggcagtggaatctgttaaagtcaaaatacccccagggggtgctgtagccgaagtaggtgttgtcgttggtgcttcctcccgatgtcccgttggagatttgcttgtagaggtggttgttgtaggtggggagggcccaggttcgggtgctggtggtgatgactctgtcgcccagccatgtggaatcgcaatgccaatttcctgaggaactacccactccgtcggcgccttcgttattgtctgccattggagcgccaccgcctgcagccattgtaccagatcccagaccagaggggcctgcggggggttctccgattggttgagggtcgggcactgactctgagtcgccagtctgcccaaagttgagtctctttttcgcgggctgctggcctgtcttgccgatgcccgtagaggagtctggagaacgctggggtgatggctctaccggtctcttctttccaggagccgtcttagcgccttcctcaaccagaccgagaggttcgagaacccgcttcttggcctggaagactgctcgcccgaggttgcccccaaaagacgtatcttcttgaagacgctcctgaaactcggcgtcggcgtggttgtacttgaggtacgggttgtccccctgctcgagctgcttgtcgtaggccttgtcgtgctcgagggccgcggcgtctgcctcgttgaccggctctcccttgtcgagtccgttgaagggtccgaggtacttgtagccaggaagcaccagaccccggccgtcgtcctgcttttgctggttggctttgggtttcggggctccaggtttcaagtcccaccactcgcgaatgccctcagagaggttgtcctcgagccaatctggaagataaccatcggcagccatacctggtttaagtcatttattgctcagaaacacagtcatccaggtccacgttgaccagatcgcaggccgagcaagcaatctcgggagcccgccccagcagatgatgaatggcacagagtttccgatacgtcctctttctgacgaccggttgagattctgacacgccggggaaacattctgaacagtctctggtcccgtgcgtgaagcaaatgttgaaattctgattcattctctcgcatgtcttgcagggaaacagcatctgaagcatgcccgcgtgacgagaacacttgttttggtacctgtcggcaaagtccaccggagctccttccgcgtctgacgtcgatggatgcaaaatgtcgcaaaagcactcacgtgacagctaatacaggaccactcccctatgacgtgatttacgtcagcgctatgcccgcgtgacgagaacatttgttttggtacctgtcggcaaagtccaccggagctccttccgcgtctgacgtcgatggatccgcgactgaggggcaggcccgcttgggctcgcttttatccgcgtcatcgggggcgggtctcttgttggctccaccctttctgacgtagaactcatgcgccacctcggtcacgtgatcctgcgcccagcggaagaactctttgacttcctgctttgtcaccttgccaaagtcatgctccagacggcgggtgagttcaaatttgaacatccggtcctgcaacggctgctggtgctcgaaggtggtgctgttcccgtcaatcacggcgcacatgttggtgttggaagtgacgatcacgggggtgggatcgatctgggcggaagacttgcacttttggtccacgcgcaccttgctgccgccgagaatggccttggcggactccacgaccttggccgtcatcttgccctcctcccaccagatcaccatcttgtcgacgcaatcgttgaagggaaagttctcattggtccagttgacgcagccgtagaaagggcgaattc

SEQ ID NO: 406 - protein, 738 aa, Adeno-associated virus; identical to SEQ ID NO: 71

SEQ ID NO: 407 - protein, 738 aa, Adeno-associated virus
MAADGYLPDWLEDNLSEGIREWWDLKPGAPKPKANQQKQDDGRGLVLPGYKYLGPFNGLDKGEPVNAADAAALEHDKAYDQQLKAGDNPYLRYNHADAEFQERLQEDTSFGGNLGRAVFQAKKRVLEPLGLVEEGAKTAPGKKRPVEPSPQRSPDSSTGIGKKGHQPARKRLNFGQTGDSESVPDPQPIGEPPAGPSGLGSGTMAAGGGAPMADNNEGADGVGSSSGNWHCDSTWLGDRVITTSTRTWALPTYNNHLYKQISNGTSGGSTNDNTYFGYSTPWGYFDFNRFHCHFSPRDWQRLINNNWGFRPKRLNFKLFNIQVKEVTQNEGTKTIANNLTSTIQVFTDSEYQLPYVPGSAHQGCLPPFPADVFMIPQYGYLTLNNGSQAVGRSSFYCLEYFPSQMLRTGNNFEFSYTFEDVPFHSSYAHSQSLDRLMNPLIDQYLYYLSRTQSTGGTQGTQQLLFSQAGPANMSAQAKNWLPGPCYRQQRVSTTLSQNNNSNFAWTGATKYHLNGRDSLVNPGVAMATHKDDEERFFPSSGVLMFGKQGAGKDNVDYSSVMLTSEEEIKTTNPVATEQYGVVADNLQQTNGAPIVGTVNSQGALPGMVWQNRDVYLQGPIWAKIPHTDGNFHPSPLMGGFGLKHPPPQILIKNTPVPADPPTTFSQAKLASFITQYSTGQVSVEIEWELQKENSKRWNPEIQYTSNYYKSTNVDFAVNTEGTYSEPRPIGTRYLTRNL

SEQ ID NO: 408 - protein, 738 aa, Adeno-associated virus; identical to SEQ ID NO: 69

SEQ ID NO: 409 - protein, 728 aa, Adeno-associated virus
MAADGYLPDWLEDNLSEGIREWWDLKPGAPKPKANQQKQDDGRGLVLPGYKYLGPFNGLDKGEPVNEADAAALEHDKAYDKQLEQGDNPYLKYNHADAEFQERLQEDTSFGGNLGRAVFQAKKRVLEPLGLVEEGAKTAPGKKRPIESPDSSTGIGRKGQQPAKKKLNFGQTGDSESVPDPQPIGEPPAGPSGLGSGTMAAGGGAPMADNNEGADGVGNASGNWHCDSTWLGDRVITTSTRTWALPTYNNHLYKQISSQSGATNDNHFFGYSTPWGYFDFNRFHCHFSPRDWQRLINNNWGFRPRKLRFKLFNIQVKEVTTNDGVTTIANNLTSTIQVFSDSEYQLPYVLGSAHQGCLPPFPADVFMIPQYGYLTLNNGSQSVGRSSFYCLEYFPSQMLRTGNNFEFSYTFEEVPFHSSYAHSQSLDRLMNPLIDQYLYYLARTQSTTGSTRELQFHQAGPNTMAEQSKNWLPGPCYRQQRLSKNIDSNNNSNFAWTGATKYHLNGRNSLTNPGVAMATNKDDEDQFFPINGVLVFGKTGAANKTTLENVLMTSEEEIKTTNPVATEEYGVVSSNLQSSTAGPQTQTVNSQGALPGMVWQNRDVYLQGPIWAKIPHTDGNFHPSPLMGGFGLKHPPPQILIKNTPVPANPPEVFTPAKFASFITQYSTGQVSVEIEWELQKENSKRWNPEIQYTSNYAKSNNVEFAVNNEGVYTEPRPIGTRYLTRNL

SEQ ID NO: 410 - DNA, 2489 bp, Adeno-associated virus
gaattcgccctttctacggctgcgtcaactggaccaatgagaactttcccttcaacgattgcgtcgacaagatggtgatctggtgggaggagggcaagatgacggccaaggtcgtgaagtccgccaaggccattcatcatctgctggggcgggctcccgagattgcttgctcggcctgcgatctggtcaacgtggacctggatgactgtgtttctgagcaataaatgacttaaaccaggtatggctgccgatggttatcttccagattggctcgaggacaacctctctgagggcattcgcgagtggtgggacttgaaacctggagccccgaaacccaaagccaaccagcaaaagcaggacgacggccggggtctggtgcttcctggctacaagtacctcggacccttcaacggactcgacaagggagagccggtcaacgaggcagacgccgcggccctcgagcacgacaaggcctacgacaagcagctcgagcagggggacaacccgtacctcaagtacaaccacgccgacgccgagtttcaggagcgtcttcaagaagatacgtcttttgggggcaacctcgggcgagcagtcttccaggccaagaagcgggttctcgaacctctcggtctggttgaggaaggcgctaagacggctcctggaaagaagagacccatagaatcccccgactcctccacgggcatcggcaggaaaggccagcagcccgctaaaaagaagctcaactttgggcagactggcgactcagagtcagtgcccgaccctcaaccaatcggagaaccccccgcaggcccctctggtctgggatctggtacaatggctgcaggcggtggcgctccaatggcagacaataacgaaggcgccgacggagtgggtaatgcctccggaaattggcattgcgattccacatggctgggcgacagagtcatcaccaccagcacccgcacctgggccctgcccacctacaacaaccacctctacaagcagatatcaagtcagagcggggctaccaacgacaaccacttcttcggctacagcaccccctggggctattttgacttcaacagattccactgccacttctcaccacgtgactggcagcgactcatcaacaacaactggggattccggcccagaaagctgcggttcaagttgttcaacatccaggtcaaggaggtcacgacgaacgacggcgttacgaccatcgccaataaccttaccagcacgattcaggtcttctcggactcggagtaccaactgccgtacgtcctcggctctgcgcaccagggctgcctccctccgttccctgcggacgtgttcatgattcctcagtacggatatctgactctaaacaacggcagtcagtctgtgggacgttcctccttctactgcctggagtactttccttctcagatgctgagaacgggcaataactttgaattcagctacacctttgaggaagtgcctttccacagcagctatgcgcacagccagagcctggaccggctgatgaatcccctcatcgaccagtacctgtactacctggcccggacccagagcactacggggtccacaagggagctgcagttccatcaggctgggcccaacaccatggccgagcaatcaaagaactggctgcccggaccctgttatcggcagcagagactgtcaaaaaacatagacagcaacaacaacagtaactttgcctggaccggggccactaaataccatctgaatggtagaaattcattaaccaacccgggcgtagccatggccaccaacaaggacgacgaggaccagttctttcccatcaacggagtgctggtttttggcaaaacgggggctgccaacaagacaacgctggaaaacgtgctaatgaccagcgaggaggagatcaaaaccaccaatcccgtggctacagaagaatacggtgtggtctccagcaacctgcaatcgtctacggccggaccccagacacagactgtcaacagccagggggctctgcccggcatggtctggcagaaccgggacgtgtacctgcagggtcccatctgggccaaaattcctcacacggacggcaactttcacccgtctcccctgatgggcggatttggactcaaacacccgcctcctcaaattctcatcaaaaacaccccggtacctgctaatcctccagaggtgtttactcctgccaagtttgcctcatttatcacgcagtacagcaccggccaggtcagcgtggagatcgagtgggaactgcagaaagaaaacagcaaacgctggaatccagagattcagtacacctcaaattatgccaagtctaataatgtggaatttgctgtcaacaacgaaggggtttatactgagcctcgccccattggcacccgttacctcacccgtaacctgtaattgcctgttaatcaataaaccggttaattcgtttcagttgaactttggtcaagggcgaattc

SEQ ID NO: 411 - protein, 728 aa, Adeno-associated virus
MAADGYLPDWLEDNLSEGIREWWDLKPGAPKPKANQQKQDDGRGLVLPGYKYLGPFNGLDKGEPVNAADAAALEHDKAYDQQLKAGDNPYLRYNHADAEFQERLQEDTSFGGNLGRAVFQAKKRVLEPLGLVEEGAKTAPGKKRPIESPDSSTGIGKKGQQPAKKKLNFGQTGDSESVPDPQPIGEPPAGPSGLGSGTMAAGGGAPMADNNEGADGVGNASGNWHCDSTWLGDRVITTSTRTWALPTYNNHLYKQISSQSGATNDNHFFGYSTPWGYFDFNRFHCHFSPRDWQRLINNNWGFRPRKLRFKLFNIQVKEVTTNDGVTTIANNLTSTIQVFSDSEYQLPYVLGSAHQGCLPPFPADVFMIPQYGYLTLNNGSQSVGRSSFYCLEYFPSQMLRTGNNFEFSYTFEEVPFHSSYAHSQSLDRLMNPLIDQYLYYLARTQSTTGSTRELQFHQAGPNTMAEQSKNWLPGPCYRRQRLSKDIDSNNNSNFAWTGATKYHLNGRNSLTNPGVAMATNKDDEDQFFPINGVLVFGKTGAANKTTLENVLMTSEEEIKTTNPVATEEYGVVSSNLQSSTAGPQTQTVNSQGALPGMVWQNRDVYLQGPIWAKIPHTDGNFHPSPLMGGFGLKHPPPQILIKNTPVPANPPEVFTPAKFASFITQYSTGQVSVEIEWELQKENSKRWNPEIQYTSNYAKSNNVEFAVNNEGVYTEPRPIGTRYLTRNL

SEQ ID NO: 412 - DNA, 3098 bp, Adeno-associated virus
gaattcgccctttctacggctgcgtcaactggaccaatgagaactttcccttcaacgattgcgtcgacaagatggtgatctggtgggaggagggcaagatgacggccaaggtcgtggagtccgccaaggccattctcggcggcagcaaggtgcgcgtggaccaaaagtgcaagtcttccgcccagatcgatcccacccccgtgatcgtcacttccaacaccaacatgtgcgccgtgattgacgggaacagcaccaccttcgagcaccagcagccgttacaagaccggatgttcaaatttgaactcacccgccgtctggagcacgactttggcaaggtgacaaagcaggaagtcaaagagttcttccgctgggcgcaggatcacgtgaccgaggtggcgcatgagttctacgtcagaaagggtggagccaacaagagacccgcccccgatgacgcggataaaagcgagcccaagcgggcctgcccctcagtcgcggatccatcgacgtcagacgcggaaggagctccggtggactttgccgacaggtaccaaaacaaatgttctcgtcacgcgggcatgcttcagatgctgtttccctgcaagacatgcgagagaatgaatcagaatttcaacatttgcttcacgcacgggaccggagactgttcagaatgtttccccggcgtgtcagaatctcaaccggtcgtcagaaagaggacgtatcggaaactctgtgccattcatcatctgctggggcgggctcccgagattgcttgctcggcctgcgatctggtcaacgtggacctggatgactgtgtttctgagcaataaatgacttaaaccaggtatggctgccgatggttatcttccagattggctcgaggacaacctctctgagggcattcgcgagtggtgggacttgaaacctggagccccgaaacccaaagccaaccagcaaaagcaggacgacggccggggtctggtgcttcctggctacaagtacctcggacccttcaacggactcgacaagggagagccggtcaacgcggcggacgcagcggccctcgagcacgacaaggcctacgaccagcagctcaaagcgggtgacaatccgtacctgcggtataaccacgccgacgccgagtttcaggagcgtcttcaagaagatacgtcttttgggggcaacctcgggcgagcagtcttccaggccaagaagcgggttctcgaacctctcggtctggttgaggaaggcgctaagacggctcctggaaagaagagacccatagaatcccccgactcctccacgggcatcggcaagaaaggccagcagcccgctaaaaagaagctcaactttgggcagactggcgactcagagtcagtgcccgaccctcaaccaatcggagaaccccccgcaggcccctctggtctgggatctggtacaatggctgcaggcggtggcgctccaatggcagacaataacgaaggcgccgacggagtgggtaatgcctccggaaattggcattgcgattccacatggctgggcgacagagtcatcaccaccagcacccgcacctgggccctgcccacctacaacaaccacctctacaagcagatatcaagtcagagcggggctaccaacgacaaccacttcttcggctacagcaccccctggggctattttgacttcaacagattccactgccacttctcaccacgtgactggcagcgactcatcaacaacaactggggattccggcccagaaagctgcggttcaagttgttcaacatccaggtcaaggaggtcacgacgaacgacggcgttacgaccatcgctaataaccttaccagcacgattcaggtcttctcggactcggagtaccaactgccgtacgtcctcggctctgcgcaccagggctgcctccctccgttccctgcggacgtgttcatgattcctcagtacggatatctgactctaaacaacggcagtcagtctgtgggacgttcctccttctactgcctggagtactttccttctcagatgctgagaacgggcaataactttgaattcagctacacctttgaggaagtgcctttccacagcagctatgcgcacagccagagcctggaccggctgatgaatcccctcatcgaccagtacctgtactacctggcccggacccagagcactacggggtccacaagggagctgcagttccatcaggctgggcccaacaccatggccgagcaatcaaagaactggctgcccggaccctgttatcggcggcagagactgtcaaaagacatagacagcaacaacaacagtaactttgcctggaccggggccactaaataccatctgaatggtagaaattcattaaccaacccgggcgtagccatggccaccaacaaggacgacgaggaccagttctttcccatcaacggagtgctggtttttggcaaaacgggggctgccaacaagacaacgctggaaaacgtgctaatgaccagcgaggaggagatcaaaaccaccaatcccgtggctacagaagaatacggtgtggtctccagcaacctgcaatcgtctacggccggaccccagacacagactgtcaacagccagggggctctgcccggcatggtctggcagaaccgggacgtgtacctgcagggtcccatctgggccaaaattcctcacacggacggcaactttcacccgtctcccctgatgggcggatttggactcaaacacccgcctcctcaaattctcatcaaaaacaccccggtacctgctaatcctccagaggtgtttactcctgccaagtttgcctcatttatcacgcagtacagcaccggccaggtcagcgtggagatcgagtgggaactgcagaaagagaacagcaaacgctggaatccagagattcagtacacctcaaattatgccaagtctaataatgtggaatttgctgtcaacaacgaaggggtttatactgagcctcgccccattggcacccgttacctcacccgtaacctgtaattacttgttaatcaataaaccggttgattcgtttcagttgaactttggtctctgcgaagggcgaattc

SEQ ID NO: 413 - protein, 685 aa, Adeno-associated virus
MAADGYLPDWLEDNLSEGIREWWDLKPGAPKPKANQQKQDDGRGLVLPGYKYLGPFNGLDKGEPVNEADAAALEHDKAYDKQLEQGDNPYLKYNHADAEFQERLQEDTSFGGNLGRAVFQAKKRVLEPLGLVEEGAKTAPGKKRPVEPSPQRSPDSSTGIGKTGQQPAKKRLNFGQTGDSESVPDPQPIGEPPAGPSGLGSGTMAAGGGAPMADNNEGADGVGSSSGNWHCDSTWLGDRVITTSTRTWALPTYNNHLYKQISNGTSGGSTNDNTYFGYSTPWGYFDFNRFHCHFSPRDWQRLINNNWGFRPKRLNFKLFNIQVKEVTQNEGTKTIANNLTSTIQVFTDSEYQLPYVLGSAHQGCLPPFPADVFMIPQYGYLTLNNGSQAVGRSSFYCLEYFPSQMLRTGNNFEFSYQFEDVPFHSSYAHSQSLDRLTNPLIDQYLYYLARTQSTTGSTRGLQFHQAGPNTMAEQSKNWLPGPCYRQQRLSKNIDSNNNSNFAWTGATKYHLNGRNSLTNPGVAMATNKDDEDQFFPINGVLVFGKTGAANKTTLENVLMTSEEEIKTTNPVATEEYGVVSSNLQSSTAGPQTQTVNSQGALPGMVWQNRDVYLQGPIWAKIPHTDGNFHPSPLMGGFGLKHPPPQILIKYTSNYYKSTNVDFAVNTEGTYSEPRPIGTRYLTRNL

SEQ ID NO: 414 - DNA, 2969 bp, Adeno-associated virus
gaattcgccctttctacggctgcgtcaactggaccaatgagaactttcccttcaacgattgcgtcgacaagatggtgatctggtgggaggagggcaagatgacggccaaggtcgtggagtccgccaaggccattctcggcggcagcaaggtgcgcgtggaccaaaagtgcaagtcgtccgcccagatcgaccccacccccgtgatcgtcacctccaacaccaacatgtgcgccgtgattgacgggaacagcaccaccttcgagcaccagcagccgttacaagaccggatgttcaaatttgaactcacccgccgtctggagcacgactttggcaaggtgacaaagcaggaagtcaaagagttcttccgctgggcgcaggatcacgtgaccgaggtggcgcatgagttctacgtcagaaagggtggagccaacaagagacccgcccccgatgacgcggataaaagcgagcccaagcgggcctgcccctcagtcgcggatccatcgacgtcagacgcggaaggagctccggtggactttgccgacaggtaccaaaacaaatgttctcgtcacgcgggcatgcttcagatgctgtttccctgcaagacatgcgagagaatgaatcagaatttcaacatttgcttcacgcacgggaccagagactgttcagaatgtttccccggcgtgtcagaatctcaaccggtcgtcagaaagaggacgtatcggaaactctgtgccattcatcatctgctggggcgggctcccgagattgcttgctcggcctgcgatctggtcaacgtggacctggatgactgtgtttctgagcaataaatgacttaaaccaggtatggctgccgatggttatcttccagattggctcgaggacaacctctctgagggcatccgcgagtggtgggacttgaaacctggagccccgaaacccaaagccaaccagcaaaagcaggacgacggccggggtctggtgcttcctggctacaagtacctcggacccttcaacggactcgacaagggagagccggtcaacgaggcagacgccgcggccctcgagcacgacaaggcctacgacaagcagctcgagcagggggacaacccgtacctcaagtacaaccacgccgacgccgagtttcaggagcgtcttcaagaagatacgtcttttgggggcaacctcgggcgagcagtcttccaggccaagaagcgggttctcgaacctctcggtctggttgaggaaggcgctaagacggctcctggaaagaagagaccggtagagccatcaccccagcgttctccagactcctctacgggcatcggcaagacaggccagcagcccgcgaaaaagagactcaactttgggcagactggcgactcagagtcagtgcccgaccctcaaccaatcggagaaccccccgcaggcccctctggtctgggatctggtacaatggctgcaggcggtggcgctccaatggcagacaataacgaaggcgccgacggagtgggtagttcctcaggaaattggcattgcgattccacatggctgggcgacagagtcatcaccaccagcacccgaacctgggccctccccacctacaacaaccacctctacaagcaaatctccaacgggacatcgggaggaagcaccaacgacaacacctacttcggctacagcaccccctgggggtattttgactttaacagattccactgccacttctcaccacgtgactggcagcgactcatcaacaacaactggggattccggcccaagagactcaacttcaagctcttcaacatccaggtcaaggaggtcacgcagaatgaaggcaccaagaccatcgccaataaccttaccagcacgattcaggtctttacggactcggaataccagctcccgtacgtcctcggctctgcgcaccagggctgcctgcctccgttcccggcggacgtcttcatgattcctcagtacgggtacctgactctgaacaacggcagtcaggccgtgggccgttcctccttctactgcctggagtactttccttctcaaatgctgagaacgggcaacaactttgagttcagctaccagtttgaggacgtgccttttcacagcagctacgcgcacagccaaagcctggaccggctgacgaaccccctcatcgaccagtacctgtactacctggcccggacccagagcactacggggtccacaagggggctgcagttccatcaggctgggcccaacaccatggccgagcaatcaaagaactggctgcccggaccctgttatcggcagcagagactgtcaaaaaacatagacagcaacaacaacagtaactttgcctggaccggggccactaaataccatctgaatggtagaaattcattaaccaacccgggcgtagccatggccaccaacaaggacgacgaggaccagttctttcccatcaacggagtgctggtttttggcaaaacgggggctgccaacaagacaacgctggaaaacgtgctaatgaccagcgaggaggagatcaaaaccaccaatcccgtggctacagaagaatacggtgtggtctccagcaacctgcaatcgtctacggccggaccccagacacagactgtcaacagccagggggctctgcccggcatggtctggcagaaccgggacgtgtacctgcagggtcccatctgggccaaaattcctcacacggacggcaactttcacccgtctcccctgatgggcggatttggactcaaacacccgcctcctcaaattctcatcaagtatacttccaactactacaaatctacaaatgtggactttgctgtcaatactgagggtacttattcagagcctcgccccattggcacccgttacctcacccgtaacctgtaattgcctgttaatcaataaaccggttaattcgtttcagttgaactttggtctctgcgaagggcgaattc

SEQ ID NO: 415 - protein, 733 aa, Adeno-associated virus
MAADGYLPDWLEDNLSEGIREWWDLKPGAPKPKANQQKQDDGRGLVLPGYKYLGPFNGLDKGEPVNAADAAALEHDKAYDQQLKAGDNPYLRYNHADAEFQERLQEDTSFGGNLGRAVFQAKKRVLEPLGLVEEGAKTAPGKKRPIESPDSSTGIGKKGQQPAKKKLNFGQTGDSESVPDPQPIGEPPAGPSGLGSGTMAAGGGAPMADNNEGADGVGSSSGNWHCDSTWLGDRVITTSTRTWALPTYNNHLYKQISNGTSGGSTNDNTYFGYSTPWGYFDFNRFHCHFSPRDWQRLINNNWGFRPKRLNFKLFNIQVKEVTQNEGTKTIANNLTSTIQVFTDSEYQLPYVLGSAHQGCLPPFPADVFMIPQYGYLTLNNGSQAVGRSSFYCLEYFPSQMLRTGNNFEFSYQFEDVPFHSSYAHSQSLDRLMNPLIDQYLYYLSRTQSTGGTAGTQQLLFSQAGPNNMSAQAKNWLPGPCYRQQRVSTTVSQNNNSNFAWTGATKYHLNGRDSLVNPGVAMATHKGDEERFFPSSGVLMFGKQGAGKDNVDYSSVMLTSEEEIKTTNPVATEQYGVVADNLQQQNAAPIVGAVNSQGALPGMVWQNRDVYLQGPIWAKIPHTDGNFHPSPLMGGFGLKHPPPQILIKNTPVPADPPTTFSQAKLASFITQYSTGQVSVEIEWELQKENSKRWNPEIQYTSNYYKSTNVDFAVNTEGTYSEPRPIGTRYLTRSL

SEQ ID NO: 416 - DNA, 3113 bp, Adeno-associated virus
gaattcgccctttctacggctgcgtcaactggaccaatgagaactttcccttcaacgattgcgtcgacaagatggtgatctggtgggaggagggcaagatgacggccaaggtcgtggagtccgccaaggccattctcggcggcagcaaggtgcgcgtggaccaaaagtgcaagtcgtccgcccagatcgatcccacccccgtgatcgtcacttccaacaccaacatgtgcgccgtgattgacgggaacagcaccaccttcgagcaccagcagccgttacaagaccggatgttcaaatttgaactcacccgccgtctggagcatgactttggcaaggtgacaaagcaggaagtcaaagagttcttccgctgggcgcaggatcacgtgaccgaggtggcgcatgagttctacgtcagaaagggtggagccaacaagagacccgcccccgatgacgcggataaaagcgagcccaagcgggcctgcccctcagtcgcggatccatcgacgtcagacgcggaaggagctccggtggactttgccgacaggtaccaaaacaaatgttctcgtcacgcgggcatgcttcagatgctgtttccctgcaagacatgcgagagaatgaatcagaatttcaacatttgcttcacgcacgggaccagagactgttcagaatgtttccccggcgtgtcagaatctcaaccggtcgtcagaaagaggacgtatcggaaactctgtgccattcatcatctgctggggcgggctcccgagattgcttgctcggcctgcgatctggtcaacgtggacctggatgactgtgtttctgagcaataaatgacttaaaccaggtatggctgccgatggttatcttccagattggctcgaggacaacctctctgagggcattcgcgagtggtgggacttgaaacctggagccccgaaacccaaagccaaccagcaaaagcaggacgacggccggggtctggtgcttcctggctacaagtacctcggacccttcaacggactcgacaagggggagcccgtcaacgcggcggacgcagcggccctcgagcacgacaaggcctacgaccagcagctcaaagcgggtgacaatccgtacctgcggtataaccacgccgacgccgagtttcaggagcgtcttcaagaagatacgtcttttgggggcaacctcgggcgagcagtcttccaggccaagaagcgggttctcgaacctctcggtctggttgaggaaggcgctaagacggctcctggaaagaagagacccatagaatcccccgactcctccacgggcatcggcaagaaaggccagcagcccgctaaaaagaagctcaactttgggcagactggcgactcagagtcagtgcccgaccctcaaccaatcggagaaccccccgcaggcccctctggtctgggatctggtacaatggctgcaggcggtggcgctccaatggcagacaataacgaaggcgccgacggagtgggtagttcctcaggaaattggcattgcgattccacatggctgggcgacagagtcatcaccaccagcacccgaacctgggccctccccacctacaacaaccacctctacaagcaaatctccaacgggacatcgggaggaagcaccaacgacaacacctacttcggctacagcaccccctgggggtattttgactttaacagattccactgccacttctcaccacgtgactggcagcgactcatcaacaacaactggggattccggcccaagagactcaacttcaagctcttcaacatccaggtcaaggaggtcacgcagaatgaaggcaccaagaccatcgccaataaccttaccagcacgattcaggtctttacggactcggaataccagctcccgtacgtcctcggctctgcgcaccagggctgcctgcctccgttcccggcggacgtcttcatgattcctcagtacgggtacctgactctgaacaacggcagtcaggccgtgggccgttcctccttctactgcctggagtactttccttctcaaatgctgagaacgggcaacaactttgagttcagctaccagtttgaggacgtgccttttcacagcagctatgcgcacagccaaagcctggaccggctgatgaaccccctcatcgaccagtacctgtactacctgtctcggactcagtccacgggaggtaccgcaggaactcagcagttgctattttctcaggccgggcctaataacatgtcggctcaggccaaaaactggctacccgggccctgctaccggcagcaacgcgtctccacgacagtgtcgcaaaataacaacagcaactttgcttggaccggtgccaccaagtatcatctgaatggcagagactctctggtaaatcccggtgtcgctatggcaacgcacaagggcgacgaagagcgattttttccatccagcggagtcttgatgtttgggaaacagggagctggaaaagacaacgtggactatagcagcgttatgctaaccagtgaggaagaaatcaaaaccaccaacccagtggccacagaacagtacggcgtggtggccgataacctgcaacagcaaaacgccgctcctattgtaggggccgtcaacagtcaaggagccttacctggcatggtctggcagaaccgggacgtgtacctgcagggtcctatctgggccaagattcctcacacggacggcaactttcatccttcgccgctgatgggaggctttggactgaaacacccgcctcctcagatcctgattaagaatacacctgttcccgcggatcctccaactaccttcagtcaagccaagctggcgtcgttcatcacgcagtacagcaccggacaggtcagcgtggaaattgaatgggagctgcagaaagagaacagcaagcgctggaacccagagattcagtatacttccaactactacaaatctacaaatgtggactttgctgtcaatactgagggtacttattcagagcctcgccccattggcacccgttacctcacccgtagcctgtaattgcctgttaatcaataaaccggttgattcgtttcagttgaactttggtctctgcgaagggcgaattc

SEQ ID NO: 417 - protein, 738 aa, Adeno-associated virus
MAADGYLPDWLEDNLSEGIREWWDLKPGAPKPKANQQKQDDGRGLVLPGYKYLGPFNGLDKGEPVNAADAAALEHDKAYDQQLKAGDNPYLRYNHADAEFQERLQEDTSFGGNLGRAVFQAKKRVLEPLGLVEEGAKTAPGKKRPVEPSPQRSPDSSTGIGKTGQQPAKKRLNFGQTGDSESVPDPQPIGEPPAGPSGLGSGTMAAGGGAPMADNNEGADGVGSSSGNWHCDSTWLGDRVITTSTRTWALPTYNNHLYKQISNGTSGGSTNDNTYFGYSTPWGYFDFNRFHCHFSPRDWQRLINNNWGFRPKRLNFKLFNIQVKEVTQNEGTKTIANNLTSTIQVFTDSEYQLPYVLGSAHQGCPPPFPADVFMIPQYGYLTLNNGSQAVGRSSFYCLEYFPSQMRRTGNNFEFSYQFEDVPFHSSYAHSQSLDRLMNPLIDQYLYYLSRTQSTGGTAGTQQLLFSQAGPNNMSAQAKNWLPGPCYRQQRVSTTLSQNNNSNFAWTGATKYHLNGRDSLVNPGVAMATHKDDEERFFPSSGVLMFGKQGAGKDNVDYSSVMLTSEEEIKTTNPVATEQYGVVADNLQQQNAAPIVGAVNSQGALPGMVWQNRDVYLQGPIWAKIPHTDGNFHPSPLMGGFGLKHPPPQILIKNTPVPADPPTTFSQAKLASFITQYSTGQVSVEIEWELQKENSKRWNPEIQYTSNYYKSTNVDFAVNTEGTYSEPRPIGTRYLTRNL

SEQ ID NO: 418 - DNA, 3128 bp, Adeno-associated virus
gaattcgccctttctacggctgcgtcaactggaccaatgagaactttcccttcaacgattgcgtcgacaagatggtgatctggtgggaggagggcaagatgacggccaaggtcgtggagtccgccaaggccattctcggcggcagcaaggtgcgcgtggaccaaaagtgcaagtcgtccgcccagatcgaccccacccccgtgatcgtcacctccaacaccaacatgtgcgccgtgattgacgggaacagcaccaccttcgagcaccagcagccgttgcaggaccggatgttcaaatttgaactcacccgccgtctggagcatgactttggcaaggtgacaaagcaggaagtcaaagagttcttccgctgggcgcaggatcacgtgaccgaggtggcgcatgagttctacgtcagaaagggtggagccaacaagagacccgcccccgatgacgcggataaaagcgagcccaagcgggcctgcccctcagtcgcggatccatcgacgtcagacgcggaaggagctccggtggactttgccgacaggtaccaaaacaaatgttctcgtcacgcgggcatgcttcagatgctgtttccctgcaagacatgcgagagaatgaatcagaatttcaacatttgcttcacgcgcgggaccagagactgttcagaatgtttcccgggcgtgtcagaatctcaaccggtcgtcagaaagaggacgtatcggaaactctgtgccattcatcatctgctggggcgggctcccgagattgcttgctcggcctgcgatctggtcaacgtggacctggatgactgtgtttctgagcaataaatgacttaaaccaggtatggctgccgatggttatcttccagattggctcgaggacaacctctctgagggcattcgcgagtggtgggacttgaaacctggagccccgaaacccaaagccaaccagcaaaagcaggacgacggccggggtctggtgcttcctggctacaagtacctcggacccttcaacggactcgacaagggggagcccgtcaacgcggcggacgcagcggccctcgagcacgacaaggcctacgaccagcagctcaaagcgggtgacaatccgtacctgcggtataaccacgccgacgccgagtttcaggagcgtctgcaagaagatacgtcttttgggggcaacctcgggcgagcagtcttccaggccaagaagcgggttctcgaacctctcggtctggttgaggaaggcgctaagacggctcctggaaagaagagaccggtagagccatcaccccagcgttctccagactcctctacgggcatcggcaagacaggccagcagcccgcgaaaaagagactcaactttgggcagactggcgactcagagtcagtgcccgaccctcaaccaatcggagaaccccccgcaggcccctctggtctgggatctggtacaatggctgcaggcggtggcgctccaatggcagacaataacgaaggcgccgacggagtgggtagttcctcaggaaattggcattgcgattccacatggctgggcgacagagtcatcaccaccagcacccgaacctgggccctccccacctacaacaaccacctctacaagcaaatctccaacgggacatcgggaggaagcaccaacgacaacacctacttcggctacagcaccccctgggggtattttgactttaacagattccactgccacttctcaccacgtgactggcagcgactcatcaacaacaactggggattccggcccaagagactcaacttcaagctcttcaacatccaggtcaaggaggtcacgcagaatgaaggcaccaagaccatcgccaataaccttaccagcacgattcaggtctttacggactcggaataccagctcccgtacgtcctcggctctgcgcaccagggctgcccgcctccgttcccggcggacgtcttcatgattcctcagtacgggtacctgactctgaacaacggcagtcaggccgtgggccgttcctccttctactgcctggagtactttccttctcaaatgcggagaacgggcaacaactttgagttcagctaccagtttgaggacgtgccttttcacagcagctacgcgcatagccaaagcctggaccggctgatgaaccccctcatcgaccagtacctgtactacctgtctcggactcagtccacgggaggtaccgcaggaactcagcagttgctattttctcaggccgggcctaataacatgtcggctcaggccaaaaactggctacccgggccctgctaccggcagcaacgcgtctccacgacactgtcgcaaaataacaacagcaactttgcttggaccggtgccaccaagtatcatctgaatggcagagactctctggtaaatcccggtgtcgctatggcaacgcacaaggacgacgaagagcgattttttccatccagcggagtcttgatgtttgggaaacagggagctggaaaagacaacgtggactatagcagcgttatgctaaccagtgaggaagaaatcaaaaccaccaacccagtggccacagaacagtacggcgtggtggccgataacctgcaacagcaaaacgccgctcctattgtaggggccgtcaacagtcaaggagccttacctggcatggtctggcagaaccgggacgtgtacctgcagggtcctatctgggccaagattcctcacacggacggcaactttcatccttcgccgctgatgggaggctttggactgaaacacccgcctcctcagatcctgattaagaatacacctgttcccgcggatcctccaactaccttcagtcaagccaagctggcgtcgttcatcacgcagtacagcaccggacaggtcagcgtggaaattgaatgggagctgcagaaagagaacagcaagcgctggaacccagagattcagtatacttccaactactacaaatctacaaatgtggactttgctgtcaatactgagggtacttattcagagcctcgccccattggcacccgttacctcacccgtaacctgtaattgcctgttaatcaataaaccggttaattcgtttcagttgaactttggtctctgcgaagggcgaattc

SEQ ID NO: 419 - protein, 738 aa, Adeno-associated virus; identical to SEQ ID NO: 407

SEQ ID NO: 420 - DNA, 1933 bp, Adeno-associated virus
  modified_base (1302)..(1302): n = a, c, t, or g
  misc_feature (1302)..(1302): n is a, c, g, or t
caaggcctacgaccagcagctcaaagcgggtgacaatccgtacctgcggtataaccacgccgacgccgagtttcaggagcgtcttcaagaagatacgtcttttgggggcaacctcgggcgagcagtcttccaggccaaaaagcgggttctcgaacctcttggtctggttgagacgccagctaagacggcacctggaaagaagcgaccggtagactcgccagactccacctcgggcatcggcaagaaaggccagcagcccgcgaaaaagagactcaactttgggcagactggcgactcagagtcagtccccgaccctcaaccaatcggagaaccaccagcaggcccctctggtctgggatctggtacaatggctgcaggcggtggcgcaccaatggctgacaataacgagggcgccgacggagtgggtaatgcctcaggaaattggcattgcgattccacatggctgggcgacagagtcatcaccaccagcacccgaacctgggccctgcccacctacaacaaccacctctacaagcaaatctccagtcagtcagcagggagcaccaacgataacgtctatttcggctacagcaccccctgggggtattttgacttcaacagattccattgccacttctcaccacgtgactggcagcgacttatcaacaacaactggggattccggcccaagaagctcaacttcaagctcttcaacatccaggtcaaggaggtcacgacgaatgacggtgtcacaaccatcgctaataaccttaccagcacggttcaggtcttttcggactcggaatatcaactgccgtacgtcctcggctccgcgcaccagggctgcctgcctccgttcccggcagacgtgttcatgattccgcagtacggatacctgactctgaacaatggcagccaatcggtaggccgttcctccttctactgcctggagtactttccttctcagatgctgagaacgggcaacaacttcacctttagctacaccttcgaggacgtgcctttccacagcagctacgcgcacagccagagtctggaccggctgatgaatcccctcatcgaccagtacctgtactacttggccagaacacagagcaacgcaggaggtactgctggcaatcgggaactgcagttttatcagggcggacctaccaccatggccgaacaagcaaagaactggctgcccggaccttgcttccggcaacagagagtatccaagacgctggatcaaaataacaacagcaactttgcctggactggtgccacaaaataccatttaaatgnaagaaattcattggttaatcccggtgtcgccatggcaacccacaaggacgacgaggaacgcttcttcccttcgagcggagttctaatttttggcaaaactggagcagctaataaaactacattagaaaacgtgctcatgacaaatgaagaagaaattcgtcctaccaacccggtagctaccgaggaatacgggattgtaagcagcaacttgcaggcggctagcaccgcagcccagacacaagttgttaacaaccagggagccttacctggcatggtctggcagaaccgggacgtgtacctgcaaggtcccatttgggccaagattcctcacacggacggcaactttcacccgtctcctctaatgggtggctttggactgaaacacccgcctccccagatcctgatcaaaaacacaccggtacctgctaatcctccagaagtgtttactcctgccaagtttgcttccttcatcacgcagtacagcaccgggcaagtcagcgttgagatcgagtgggagctgcagaaagagaacagcaagcgctggaacccagagattcagtacacctccaactttgacaaacagactggagtggactttgctgttgacagccagggtgtttactctgagcct

SEQ ID NO: 421 - protein, 733 aa, Adeno-associated virus
MAADGYLPDWLEDNLSEGIREWWDLKPGAPKPKANQQKQDDGRGLVLPGYKYLGPFNGLDKGEPVNAADAAALEHDKAYDQQLKAGDNPYLRYNHADAEFQERLQEDTSFGGNLGRAVFQAKKRVLEPLGLVEEGAKTAPGKKRPLESPQEPDSSSGIGKKGKQPAKKRLNFEEDTGAGDGPPEGSDTSAMSSDIEMRAAPGGNAVDAGQGSDGVGNASGDWHCDSTWSEGKVTTTSTRTWVLPTYNNHLYLRLGTTSNSNTYNGFSTPWGYFDFNRFHCHFSPRDWQRLINNNWGLRPKAMRVKIFNIQVKEVTTSNGETTVANNLTSTVQIFADSSYELPYVMDAGQEGSLSPFPNDVFMVPQYGYCGIVTGENQNQTDRNAFYCLEYFPSQMLRTGNNFEMAYNFGKVPFHSMYAYSQSPDRLMNPLLDQYLWHLQSTTSGETLNQGNAATTFGKIRSGDFAFYRKNWLPGPCVKQQRLSKTASQNYKIPASGGNALLKYDTHYTLNNRWSNIAPGPPMATAGPSDGDFSNAQLIFPGPSVTGNTTTSANNLLFTSEEEIAATNPRDTDMFGQIADNNQNATTAPITGNVTAMGVLPGMVWQNRDIYYQGPIWAKIPHADGHFHPSPLIGGFGLKHPPPQIFIKNTPVPANPATTFTAARVDSFITQYSTGQVAVQIEWEIEKERSKRWNPEVQFTSNYGNQSSMLWAPDTTGKYTEPRVIGSRYLTNHL

SEQ ID NO: 422 - DNA, 3105 bp, Adeno-associated virus
gaattcgcccttgctgcgtcaactggaccaatgagaactttcccttcaacgattgcgtcgacaagatggtgatctggtgggaggagggcaagatgaccgccaaggtcgtggagtccgccaaggccattctgggcggaagcaaggtgcgcgtggaccaaaagtgcaagtcatcggcccagatcgaccccacgcccgtgatcgtcacctccaacaccaacatgtgcgccgtgatcgacgggaacagcaccaccttcgagcaccagcagccgctgcaggaccgcatgttcaagttcgagctcacccgccgtctggagcacgactttggcaaggtgaccaagcaggaagtcaaagagttcttccgctgggctcaggatcacgtgactgaggtggcgcatgagttctacgtcagaaagggcggagccaccaaaagacccgcccccagtgacgcggatataagcgagcccaagcgggcctgcccctcagttgcggagccatcgacgtcagacgcggaagcaccggtggactttgcggacaggtaccaaaacaaatgttctcgtcacgcgggcatgcttcagatgctgtttccctgcaagacatgcgagagaatgaatcagaatttcaacgtctgcttcacgcacggggtcagagactgctcagagtgcttccccggcgcgtcagaatctcaacccgtcgtcagaaaaaagacgtatcagaaactgtgcgcgattcatcatctgctggggcgggcacccgagattgcgtgttcggcccgcgatctcgtcaacgtggacttggatgactgtgtttctgagcaataaatgacttaaaccaggtatggctgctgacggttatcttccagattggctcgaggacaacctctctgagggcattcgcgagtggtgggacctgaaacctggagcccccaagcccaaggccaaccagcagaagcaggacgacggccggggtctggtgcttcctggctacaagtacctcggacccttcaacggactcgacaagggggagcccgtcaacgcggcggacgcagcggccctcgagcacgacaaggcctacgaccagcagctcaaagcgggtgacaatccgtacctgcggtataaccacgccgacgccgagtttcaggagcgtctgcaagaagatacgtcttttgggggcaacctcgggcgagcagtcttccaggccaagaagagggtactcgaacctctgggcctggttgaagaaggtgctaagacggctcctggaaagaagagaccgttagagtcaccacaagagcccgactcctcctcaggaatcggcaaaaaaggcaaacaaccagccaaaaagagactcaactttgaagaggacactggagccggagacggaccccctgaaggatcagataccagcgccatgtcttcagacattgaaatgcgtgcagcaccgggcggaaatgctgtcgatgcgggacaaggttccgatggagtgggtaatgcctcgggtgattggcattgcgattccacctggtctgagggcaaggtcacaacaacctcgaccagaacctgggtcttgcccacctacaacaaccacttgtacctgcggctcggaacaacatcaaacagcaacacctacaacggattctccaccccctggggatactttgactttaacagattccactgtcacttctcaccacgtgactggcaaagactcatcaacaacaactggggactacgaccaaaagccatgcgcgttaaaatcttcaatatccaagttaaggaggtcacaacgtcgaacggcgagactacggtcgctaataaccttaccagcacggttcagatatttgcggactcgtcgtatgagctcccgtacgtgatggacgctggacaagagggaagtctgtctcctttccccaatgacgtcttcatggtgcctcaatatggctactgtggcattgtgactggcgaaaatcagaaccagacggacagaaatgctttctactgcctggagtattttccttcacaaatgctgagaactggcaataactttgaaatggcttacaactttgggaaggtgccgttccactcaatgtatgcttacagccagagcccggacagactgatgaatcccctcctggaccagtacctgtggcacttacagtcgaccacctctggagagactctgaatcaaggcaatgcagcaaccacatttggaaaaatcaggagtggagactttgccttttacagaaagaactggctgcctgggccttgtgttaaacagcagagactctcaaaaactgccagtcaaaattacaagattcctgccagcgggggcaacgctctgttaaagtatgacacccactataccttaaacaaccgctggagcaacatagcgcctggacctccaatggcaacagctggaccttcagatggggacttcagcaacgcccagctcatcttccctggaccatcagtcaccggaaacacaacaacctcagcaaacaatctgttgtttacatcagaagaagaaattgctgccaccaacccaagagacacggacatgtttggtcagattgctgacaataatcagaatgctacaactgctcccataaccggcaacgtgactgctatgggagtgcttcctggcatggtgtggcaaaacagagacatttactaccaagggccaatttgggccaagatcccacacgcggacggacattttcatccttcaccgctaattggcggttttggactgaaacatccgcctccccagatatttatcaaaaacacccccgtacctgccaatcctgcgacaaccttcactgcagccagagtggactctttcatcacacaatacagcaccggccaggtcgctgttcagattgaatgggaaatcgaaaaggaacgctccaaacgctggaatcctgaagtgcagtttacttcaaactatgggaaccagtcttctatgttgtgggctcccgatacaactgggaagtatacagagccgcgggttattggctctcgttatttgactaatcatttgtaactgcctagttaatcaataaaccgtgtgattcgtttcagttgaactttggtctctgcgaagggcgaattc

SEQ ID NO: 423 - protein, 733 aa, Adeno-associated virus
MAADGYLPDWLEDNLSEGIREWWDLKPGAPKPKANQQKQDDGRGLVLPGYKYLGPFNGLDKGEPVNAADAAALEHDKAYDQQLKAGDNPYLRYNHADAEFQERLQEDTSFGGNLGRAVFQAKKRVLEPLGLVEEGAKTAPGKKRPLESPQEPDSSSGIGKKGKQPAKKRLNFEEDTGAGDGPPEGSDTSAMSSDIEMRAAPGGNAVDAGQGSDGVGNASGDWHCDSTWSEGKVTTTSTRTWVLPTYNNHLYLRLGTTSNSNTYNGFSTPWGYFDFNRFHCHFSPRDWQRLINNNWGLRPKAMRVKIFNIQVKEVTTSNGETTVANNLTSTVQIFADSSYELPYVMDAGQEGSLPPFPNDVFMVPQYGYCGIVTGENQNQTDRNAFYCLEYFPSQMLRTGNNFEMAYNFEKVPFHSMYAHSQSLDRLMNPLLDQYLWHLQSTTSGETLNQGNAATTFGKIRSGDFAFYRKNWLPGPCVKQQRFSKTASQNYKIPASGGNALLKYDTHYTLNNRWSNIAPGPPMATAGPSDGDFSNAQLIFPGPSVTGNTTTSANNLLFTSEEEIAATNPRDTDMFGQIADNNQNATTAPITGNVTAMGVLPGMVWQNRDIYYQGPIWAKIPHADGHFHPSPLIGGFGLKHPPPQIFIKNTPVPANPATTFTAARVDSFITQYSTGQVAVQIEWEIEKERSKRWNPEVQFTSNYGNQSSMLWAPDTTGKYTEPRVIGSRYLTNHL

SEQ ID NO: 424 - DNA, 3105 bp, Adeno-associated virus
gaattcgcccttgctgcgtcaactggaccaatgagaactttcccttcaacgattgcgtcgacaagatggtgatctggtgggaggagggcaagatgaccgccaaggtcgtggagtccgccaaggccattctgggcggaagcaaggtgcgcgtggaccaaaagtgcaagtcatcggcccagatcgaccccacgcccgtgatcgtcacctccaacaccaacatgtgcgccgtgatcgacgggaacagcaccaccttcgagcaccagcagccgctgcaggaccgcatgttcaagttcgagctcacccgccgtctggagcacgactttggcaaggtgaccaagcaggaagtcaaagagttcttccgctgggctcaggatcacgtgactgaggtggcgcatgagttctacgtcagaaagggcggagccaccaaaagacccgcccccagtgacgcggatataagcgagcccaagcgggcctgcccctcagttgcggagccatcgacgtcagacgcggaagcaccggtggactttgcggacaggtaccaaaacaaatgttctcgtcacgcgggcatgcttcagatgctgtttccctgcaagacatgcgagagaatgaatcagaatttcaacgtctgcttcacgcacggggtcagagactgctcagagtgcttccccggcgcgtcagaatctcaacccgtcgtcagaaaaaagacgtatcagaaactgtgcgcgattcatcatctgctggggcgggcacccgagattgcgtgttcggcctgcgatctcgtcaacgtggacttggatgactgtgtttctgagcaataaatgacttaaaccaggtatggctgctgacggttatcttccagattggctcgaggacaacctctctgagggcattcgcgagtggtgggacctgaaacctggagcccccaagctcaaggccaaccagcagaagcaggacgacggccggggtctggtgcttcctggctacaagtacctcggacccttccacggactcgacaagggggagcccgtcaacgcggcggacgcagcggccctcgagcacgacaaggcctacgaccagcagctcaaagcgggtgacaatccgtacctgcggtataaccacgccgacgccgagtttcaggagcgtctgcaagaagatacgtcttttgggggcaacctcgggcgagcagtcttccaggccaagaagagggtactcgaaccactgggcctggttgaagaaggtgctaagacggctcctggaaagaagagaccgttagagtcaccacaagagcccgactcctcctcaggaatcggcaaaaaaggcaaacaaccagccaaaaagagactcaactttgaagaggacactggagccggagacggaccccctgaaggatcagataccagcgccatgtcttcagacattgaaatgcgtgcagcaccgggcggaaatgctgtcgatgcgggacaaggttccgatggagtgggtaatgcctcgggtgattggcattgcgattccacctggtctgagggcaaggtcacaacaacctcgaccagaacctgggtcttgcccacctacaacaaccacttgtacctgcggctcggaacaacatcaaacagcaacacctacaacggattctccaccccctggggatactttgactttaacagattccactgtcacttctcaccacgtgactggcaaagactcatcaacaacaactggggactacgaccaaaagccatgcgcgttaaaatcttcaatatccaagttaaggaggtcacaacgtcgaacggcgagactacggtcgctaataaccttaccagcacggttcagatatttgcggactcgtcgtatgagctcccgtacgtgatggacgctggacaagagggaagtctgcctcctttccccaatgacgtcttcatggtgcctcaatatggctactgtggcattgtgactggcgaaaatcagaaccagacggacagaaatgctttctactgcctggagtattttccttcacaaatgctgagaactggcaataactttgaaatggcttacaactttgagaaggtgccgttccactcaatgtatgctcacagccagagcctggacagactgatgaatcccctcctggaccagtacctgtggcacttacagtcgaccacctctggagagactctgaatcaaggcaatgcagcaaccacatttggaaaaatcaggagtggagactttgccttttacagaaagaactggctgcctgggccttgtgttaaacagcagagattctcaaaaactgccagtcaaaattacaagattcctgccagcgggggcaacgctctgttaaagtatgacacccactataccttaaacaaccgctggagcaacatagcgcctggacctccaatggcaacagctggaccttcagatggggacttcagcaacgcccagctcatcttccctggaccatcagtcaccggaaacacaacaacctcagcaaacaatctgttgtttacatcagaaggagaaattgctgccaccaacccaagagacacggacatgtttggtcagattgctgacaataatcagaatgctacaactgctcccataaccggcaacgtgactgctatgggagtgcttcctggcatggtgtggcaaaacagagacatttactaccaagggccaatttgggccaagatcccacacgcggacggacattttcatccttcaccgctaattggcggttttggactgaaacatccgcctccccagatatttatcaaaaacacccccgtacctgccaatcctgcgacaaccttcactgcagccagagtggactctttcatcacacaatacagcaccggccaggtcgctgttcagattgaatgggaaatcgaaaaggaacgctccaaacgccggaatcctgaagtgcagtttacttcaaactatgggaaccagtcttctatgttgtgggctcccgatacaactgggaagtatacagagccgcgggttattggctctcgttatttgactaatcatttgtaactgcctagttaatcaataaaccgtgtgattcgtttcagttgaactttggtctctgcgaagggcgaattc

SEQ ID NO: 425 - protein, 733 aa, Adeno-associated virus
MAADGYLPDWLEDNLSEGIREWWDLKPGAPKPKANQQKQDDGRGLVLPGYEYLGPFNGLDKGEPVNAADAAALEHDKAYDQQLKAGDNPYLRYNHADAEFQERLQEDTSFGGNLGRAVFQAKKRVLEPLGLVEEGAKTAPGKKRPLESPQEPDSSSGIGKKGKQPAKKRLNFEEDTGAGDGPPEGSDTSAMSSDIEMRAAPGGNAVDAGQGSDGVGNASGDWHCDSTWSEGKVTTTSTRTWVLPTYNNHLYLRLGTTSNSNTYNGFSTPWGYFDFNRFHCHFSPRDWQRLINNNWGLRPKAMRVKIFNIQVKEVTTSNGETTVANNLTSTVQIFADSSYELPYVMDAGQEGSLPPFPNDVFMVPQYGYCGIVTGENQNQTDRNAFYCLEYFPSQMLRTGNNFETAYNFEKVPFHSMYAHSQSLDGLMNPLLDQYLWHLQSTTSGETLNQGNAATTFGKIRSGDFAFYRKNWLPGPCVKQQRFSKTASQNYKIPASGGNALLKYDTHYTLNNRWSNIAPGPPMATAGPSDGDFSNAQLIFPGPSVTGNTTTSANNLLFTSEEEIAATNPRDTDMFGQIADNNQNATTAPITGNVTAMGVLPGMVWQNRDIYYQGPIWAKIPHADGHFHPSPLIGGFGLKHPPPQIFIKNTPVPAYPATTFTAARVDSFITQYSTGQVAVQIEWEIEKERSKRWNPEVQFTSNCGNQSSMLWAPDTTGKYTEPRVIGSRYLTNHL

SEQ ID NO: 426 - DNA, 3105 bp, Adeno-associated virus
gaattcgcccttcgcagagaccaaagttcaactgaaacgaatcacacggtttattgattaactaggcagttacaaatgattagtcaaataacgagagccaataacccgcggctctgtatacttcccagttgtatcgggagcccacaacatagaagactggttcccacagtttgaagtaaactgcacttcaggattccagcgtttggagcgttccttttcgatttcccattcaatctgaacagcgacctggccggtgctgtattgtgtgatgaaagagtccactctggctgcagtgaaggttgtcgcaggataggcaggtacgggggtgtttttgataaatatctggggaggcggatgtttcagtccaaaaccgccaattagcggtgaaggatgaaaatgtccgtccgcgtgtgggatcttggcccaaattggcccttggtagtaaatgtctctgttttgccacaccatgccaggaagcactcccatagcagtcacgttgccggttatgggagcagttgtagcattctgattattgtcagcaatctgaccaaacatgtccgtgtctcttgggttggtggcagcaatttcttcttctgatgtaaacaacagattgtttgctgaggttgttgtgtttccggtgactgatggtccagggaagatgagctgggcgttgctgaagtccccatctgaaggtccagctgttgccattggaggtccaggcgctatgttgctccagcggttgtttaaggtatagtgggtgtcatactttaacagagcgttgcccccgctggcaggaatcttgtaattttgactggcagtttttgagaatctctgctgtttaacacaaggcccaggcagccagttctttctgtaaaaggcaaagtctccactcctgatttttccaaatgtggttgctgcattgccttgattcagagtctctccagaggtggtcgactgtaagtgccacaggtactggtccaggaggggattcatcagtccgtccaggctctggctgtgagcatacattgagtggaacggcaccttctcaaagttgtaagccgtttcaaagttattgccagttctcagcatttgtgaaggaaaatactccaggcagtagaaagcatttctgtccgtctggttctgattttcgccagtcacaatgccacagtagccatattgaggcaccatgaagacgtcattggggaaaggaggcagacttccctcttgtccagcgtccatcacgtacgggagctcatacgacgagtccgcaaatatctgaaccgtgctggtaaggttattagcgaccgtagtctcgccgttcgacgttgtgacctccttaacttggatattgaagattttaacgcgcatggcttttggtcgtagtccccagttgttgttgatgagtctttgccagtcacgtggtgagaagtgacagtggaatctgttaaagtcaaagtatccccagggggtggagaatccgttgtaggtgttgctgtttgatgttgttccgagccgcaggtacaagtggttgttgtaggtgggcaagacccaggttctggtcgaggttgttgtgaccttgccctcagaccaggtggaatcgcaatgccaatcacccgaggcattacccactccatcggaaccttgtcccgcatcgacagcatttccgcccggtgctgcacgcatttcaatgtctgaagacatggcgctggtatctgatccttcagggggtccgtctccggctccagtgtcctcttcaaagttgagtctctttttggctggttgtttgccttttttgccgattcctgaggaggagtcgggctcttgtggtgactctaacggtctcttctttccaggagccgtcttagcaccttcttcaaccaggcccagaggttcgagtaccctcttcttggcctggaagactgctcgcccgaggttgcccccaaaagacgtatcttcttgcagacgctcctgaaactcggcgtcggcgtggttataccgcaggtacggattgtcacccgctttgagctgctggtcgtaggccttgtcgtgctcgagggccgctgcgtccgccgcgttgacgggctcccccttgtcgagtccgttgaagggtccgaggtactcgtagccaggaagcaccagaccccggccgtcgtcctgcttctgctggttggccttgggcttgggggctccaggtttcaggtcccaccactcgcgaatgccctcagagaggttgtcctcgagccaatctggaagataaccgtcagcagccatacctggtttaagtcatttattgctcagaaacacagtcatccaagtccacgttgacgagatcgcaggccgaacacgcaatctcgggtgcccgccccagcagatgatgaatcgcgcacagtttctgatacgtcttttttctgacgacgggttgagattctgacgcgccggggaagcactctgagcagtctctgaccccgtgcgtgaagcagacgttgaaattctgattcattctctcgcatgtcttgcagggaaacagcatctgaagcatgcccgcgtgacgagaacatttgttttggtacctgtccgcaaggtccaccggtgcttccgcgtctgacgtcgatggctccgcaactgaggggcaggcccgcttgggctcgcttatatccgcgtcactgggggcgggtcttttggtggctccgccctttctgacgtagaactcatgcgccacctcagtcacgtgatcctgagcccagcggaagaactctttgacttcctgcttggtcaccttgccaaagtcgtgctccagacggcgggtgagctcgaacttgaacatgcggtcctgcagcggctgctggtgctcgaaggtggtgctgttcccgtcgatcacggcgcacatgttggtgttggaggtgacgatcacgggcgtggggtcgatctgggccgatgacttgcacttttggtccacgcgcaccttgcttccgcccagaatggccttggcggactccacgaccttggcggtcatcttgccctcctcccaccagatcaccatcttgtcgacgcaatcgttgaagggaaagttctcattggtccagttgacgcagcaagggcgaattc

SEQ ID NO: 427 - protein, 729 aa, Adeno-associated virus
MAADGYLPDWLEDNLSEGIREWWDLKPGAPKPKANQQKQDDGRGLVLPGYKYLGPFNGLDKGEPVNAADAAALEHDKAYDQQLKAGDNPYLRYNHADAEFQERLQEDTSFGGNLGRAVFQAKKRVLEPLGLVEEGAKTAPGKKRPIDSPDSSTGIGKKGQQPAKKKLNFGQTGDSESVPDPQPLGEPPAAPSSVGSGTMAAGGGAPMADNNEGADGVGNASGNWHCDSTWLGDRVITTSTRTWALPTYNNHLYKQISSSSSGATNDNHYFGYSTPWGYFDFNRFHCHFSPRDWQRLINNNWGFRPKKLRFKLFNIQVKEVTTNDGVTTIANNLTSTVQVFSDSEYQLPYVLGSAHQGCLPPFPADVFMIPQYGYLTLNNGSQSVGRSSFYCLEYFPSQMLRTGNNFEFSYSFEDVPFHSSYAHSQSLDRLMNPLIDQYLYYLARTQSTTGSTRELQFHQAGPNTMAEQSKNWLPGPCYRQQGLSKNLDFNNNSNFAWTAATKYHLNGRNSLTNPGIPMATNKDDEDQFFPINGVLVFGKTGAANKTTLENVLMTSEEEIKTTNPVATEEYGVVSSNLQPSTAGPQSQTINSQGALPGMVWQNRDVYLQGPIWAKIPHTDGNFHPSPLMGGFGLKHPPPQILIKNTPVPANPPEVFTPAKFASFITQYSTGQVSVEIEWELQKENSKRWNPEIQYTSNYAKSNNVEFAVNPDGVYTEPRPIGTRYLPRNL

SEQ ID NO: 428 - DNA, 3094 bp, Adeno-associated virus
gaattcgcccttgctgcgtcaactggaccaagagaactttcccttcaacgattgcgtcgacaagatggtgatctggtgggaggagggcaagatgacggccaaggtcgtggagtccgccaaagccattctgggcggaagcaaggtgcgcgtcgaccaaaagtgcaagtcctcggcccagatcgatcccacccccgtgatcgtcacctccaacaccaacatgtgcgccgtgatcgacgggaacagcaccaccttcgagcaccagcagccgttgcaggaccggatgttcaaatttgaactcacccgccgtctggaacacgactttggcaaggtgaccaagcaggaagtcaaagagttcttccgctgggctagtgatcacgtgactgaggtgacgcatgagttctacgtcagaaagggcggagccagcaaaagacccgcccccgatgacgcggatataagcgagcccaagcgggcctgtccctcagtcacggacccatcgacgtcagacgcggaaggagctccggtggactttgccgacaggtaccaaaacaaatgttctcgtcacgcgggcatgcttcagatgctgtttccctgcaaaacgtgcgagagaatgaatcagaatttcaacatttgcttcacgcacggggtcagagactgtttagaatgtttccccggcgtgtcagaatctcaaccggtcgtcagaaaaaagacgtatcggaagctgtgtgcgattcatcatctgctggggcgggcacccgagattgcttgctcggcctgcgacctggtcaacgtggacctggacgactgtgtttctgagcaataaatgacttaaaccgggtatggctgccgatggttatcttccagattggctcgaggacaacctctctgagggcattcgcgagtggtgggacctgaaacctggagccccgaaacccaaagccaaccagcaaaagcaggacgacggccggggtctggtgcttcctggctacaagtacctcggacccttcaacggactcgacaagggggagcccgtcaacgcggcggacgcagcggccctcgagcacgacaaggcctacgaccagcagctcaaagcgggtgacaatccgtacctgcggtataaccacgccgacgccgagtttcaggagcgtctgcaagaagatacgtcatttgggggcaacctcgggcgagcagtcttccaggccaagaagcgggttctcgaacctctcggtctggttgaggaaggcgctaagacggctcctggaaagaagagacccatagactctccagactcctccacgggcatcggcaaaaaaggccagcagcccgctaaaaagaagctcaattttggtcagactggcgactcagagtcagtccccgaccctcaacctcttggagaacctccagcagcgccctctagtgtgggatctggtacaatggctgcaggcggtggcgcaccaatggcagacaataacgaaggtgccgacggagtgggtaatgcctcaggaaattggcattgcgattccacatggctgggcgacagagtcatcaccaccagcaccagaacctgggccctccccacctacaacaaccacctctacaagcaaatctccagcagcagctcaggagccaccaatgacaaccactacttcggctacagcaccccctgggggtattttgactttaacagattccactgccacttctcaccacgtgactggcagcgactcatcaacaacaactggggattccggcccaagaagctgcggttcaagctcttcaacatccaggtcaaggaggtcacaacgaatgacggcgtcacgaccatcgctaataaccttaccagcacggttcaggtcttctcggactcggaataccagctgccgtacgtcctcggctctgcgcaccagggctgcctgcctccgttcccggcggacgtcttcatgattcctcagtacggctacctgactctgaacaacggcagccaatcggtgggccgttcctccttctactgcctggaatatttcccctctcaaatgctgagaacgggcaacaactttgagttcagttacagcttcgaggacgtgcctttccacagcagctacgcgcacagccagagcctagaccggctgatgaaccctctcatcgaccagtacctgtactacctggcccggacccagagcaccacgggttccaccagggaactgcaatttcatcaagctgggcccaatactatggccgagcagtcaaagaactggctgcctggaccctgctataggcaacagggactgtcaaagaacttggactttaacaacaacagcaattttgcctggactgctgccactaaatatcatctgaatggcagaaactctttgaccaatcctggcattcccatggcaaccaacaaggatgatgaggaccagttctttcccatcaacggggtactggtttttggcaagacgggagctgccaacaaaactacgctggaaaacgttctgatgaccagcgaggaggagatcaagaccactaaccctgtggctacagaagaatacggtgtggtctccagcaacctgcagccgtctacagccgggcctcaatcacagactatcaacagccagggagcactgcctggcatggtctggcagaaccgggacgtgtatctgcagggtcccatctgggccaaaattcctcacacggatggcaactttcacccgtctcctctgatgggcggttttggactcaaacacccgcctccacagatcctgatcaaaaacacacctgtacctgctaatcctccggaggtgtttactcctgccaagtttgcctccttcatcacgcagtacagcaccggacaagtcagcgtggaaatcgagtgggagctgcagaaagaaaacagcaagcgctggaacccagaaattcagtatacttccaattatgccaagtctaataatgttgaatttgctgtgaaccctgatggtgtttatactgagcctcgccccattggcactcgttacctcccccgtaatctgtaattgcttgttaatcaataaaccggttgattcgtttcagttgaactttggtctctgcgaagggcgaattc

SEQ ID NO: 429 - protein, 1458 aa, Adeno-associated virus
MAADGYLPDWLEDNLSEGIREWWDLKPGAPKPKANQQKQDDGRGLVLPGYKYLGPFNGLDKGEPVNAADAAALEHDKAYDQQLKAGDNPYLRYNHADAEFQERLQEDTSFGGNLGRAVFQAKKRVLEPLGLVEEGAKTAPGKKRPIDSPDSSTGIGKKGQQPAKKKLNFGQTGDSESVPDPQPLGEPPAAPSSVGSGTMAAGGGAPTADNNEGADGVGNASGNWHCDSTWLGDRVITTSTRTWALPTYNNHLYKQISSSSSGATNDNHYFGYSTPWGYFDFNRFHCHFSPRDWQRLINNNWGFRPKKLRFKLFNIQVKEVTTNDGVTTIANNLTSTVQVFSDSEYQLPYVLGSAHQGCLPPFPADVFMIPQYGYLTLNNGSQSVGRSSFYCLEYFPSQMLRTGNNFEFSYSFEDVPFHSSYAHSQSLDRLMNPLIDQYLYYLARTQSTTGSTRELQFHQAGPNTMAEQSKNWLPGPCYRQQRLSKNLDFNNNSNFAWTAATKYHLNGRNSLTNPGIPMATNKDDEDQFFPINGVLVFGKTGAANKTTLENVLMTSEEEIKTTNPVATEEYGVVSSNLQSSTAGPQSQTINSQGALPGMVWQNRDVYLQGPIWAKIPHTDGNFHPSPLMGGFGLEHPPPQILIKNTPVPANPPEVFTPAKFASFITQYSTGQVSVEIEWELQKENSKRWNPEIQYTSNYAKSNNVEFAVNPDGVYTEPRPIGTRYLTRNLMAADGYLPDWLEDNLSEGIREWWDLKPGAPKPKANQQKQDDGRGLVLPGYKYLGPFNGLDKGEPVNAADAAALEHDKAYDQQLKAGDNPYLRYNHADAEFQERLQEDTSFGGNLGRAVFQAKKRVLEPLGLVEEGAKTAPGKKRPIGSPDSSTGIGKKGQQPAKKKLNFGQTGDSESVPDPQPLGEPPAAPSSVGSGTMAAGGGAPMADNNEGADGVGNASGNWHCDSTWLGDRVITTSTRTWALPTYNNHLYKQISSSSSGATNDNHYFGYSTPWGYFDFNRFHCHFSPRDWQRLINNNWGFRPKKLRFKLLNIQVKEVTTNDGVTTIANNLTSTVQVFSDSEYQLPYVLGSAHQGCLPPFPADVFMIPQYGYLTLDNGSQSVGRSSFYCLEYFPSQMLRTGNNFEFSYSFEDVPFHSSYAHSQSLDRLMNPLIDQYLYYLARTQSTTGSTRELQFHQAGPNTMAEQSKNWLPGPCYRQQRLSKNLDFNNNSNFAWTAATKYHLNGRNSLTNPGIPMATNKDDEDQFFPINGVLVFGKTGAANKTTLENVLMTSEEEIKTTNPVATEEYGVVSSNLQSSTAGPQSQTINSQGALPGMVWQNRDVYLQGPIWAKIPHTDGNFHPSPLMGGFGLKHPPPQILIKNTPVPANPPEVFTPAKFASFITQYSTGQVSVEIEWELQKENSKRWNPEIQYTSNYAKSNNVEFAVNPDGVYTEPRPIGTRYLTRNL

SEQ ID NO: 430 - DNA, 3095 bp, Adeno-associated virus
gaattcgcccttcgcagagaccaaagttcaactgaaacgaatcaaccggtttattgattaacaagcaattacagattacgggtgaggtaacgagtgccaatggggcgaggctcagtataaacaccatcagggttcacagcaaattcaacattattagacttggcataattggaagtatactgaatttctgggttccagcgcttgctgttttctttctgcagctcccactcgatttccacgctgacttgtccggtgctgtactgcgtgatgaaggaggcaaacttggcaggagtaaacacctccggaggattagcaggtacaggtgtgtttttgatcaggatctgtggaggcgggtgtttgagtccaaaaccgcccatcagaggagacgggtgaaagttgccatccgtgtgaggaattttggcccagatgggaccctgcagatacacgtcccggttctgccagaccatgccaggcagtgctccctggctgttgatagtctgtgattgaggcccggctgtagacgactgcaggttgctggagaccacaccgtattcttctgtagccacagggttagtggtcttgatctcctcctcgctggtcatcagaacgttttccagcgtagttttgttggcagctcccgtcttgccaaaaaccagtaccccgttgatgggaaagaactggtcctcatcatccttgttggttgccatgggaatgccaggattggtcaaagagtttctgccattcagatgatatttagtggcagcagtccaggcaaaattgctgttgttgttaaagtccaagttctttgacagtctctgttgcctatagcagggtccaggcagccagttctttgactgctcggccatagtattgggcccagcttgatgaaattgcagttccctggtggaacccgtggtgctctgggtccgggccaggtagtacaggtactggtcgatgagagggttcatcagccggtctaggctctggctgtgcgcgtagctgctgtggaaaggcacgtcctcgaagctgtaactgaactcaaagttgttgcccgttctcagcatttgagaggggaaatattccaggcagtagaaggaggaacggcccaccgattggctgccgttgtccagagtcaggtagccgtactgaggaatcatgaagacgtccgccgggaacggaggcaggcagccctggtgcgcagagccgaggacgtacggcagctggtattccgagtccgagaagacctgaaccgtgctggtaaggttattagcgatggtcgtgacgccgtcattcgttgtgacctccttgacctggatgttgaggagcttgaaccgcagcttcttgggccggaatccccagttgttgttgatgagtcgctgccagtcacgtggtgagaagtggcagtggaatctgttaaagtcaaaatacccccagggggtgctgtagccgaagtagtggttgtcattggtggctcctgagctgctgctggagatttgcttgtagaggtggttgttgtaggtggggagggcccaggttctggtgctggtggtgatgactctgtcgcccagccatgtggaatcgcaatgccaatttcctgaggcattacccactccgtcggcaccttcgttattgtctgccattggtgcgccaccgcctgcagccattgtaccagatcccacactagagggcgctgctggaggttctccaagaggttgagggtcggggactgactctgagtcgccagtctgaccaaaattgagcttctttttagcgggctgctggccttttttgccgatgcccgtggaggagtctggagagcctatgggtctcttctttccaggagccgtcttagcgccttcctcaaccagaccgagaggttcgagaacccgcttcttggcctggaagactgctcgcccgaggttgcccccaaatgacgtatcttcttgcagacgctcctgaaactcggcgtcggcgtggttataccgcaggtacggattgtcacccgctttgagctgctggtcgtaggccttgtcgtgctcgagggccgctgcgtccgccgcgttgacgggctcccccttgtcgagtccgttgaagggtccgaggtacttgtagccaggaagcaccagaccccggccgtcgtcctgcttttgctggttggctttgggtttcggggctccaggtttcaggtcccaccactcgcgaatgccctcagagaggttgtcctcgagccaatctggaagataaccatcggcagccatacctggtttaagtcatttattgctcagaaacacagtcgtccaggtccacgttgaccaggtcgcaggccgagcaagcaatctcgggtgcccgccccagcagatgatgaatcgcacacagcttccgatacgtcttttttctgacgaccggttgagattctgacacgccggggaaacattctaaacagtctctgaccccgtgcgtgaagcaaatgttgaaattctgattcattctctcgcacgttttgcagggaaacagcacctgaagcatgcccgcgtgacgagaacatttgttttggtacctgtcggcaaagtccaccggagctccttccgcgtctgacgtcgatgggtccgtgactgagggacgggcccgcttgggctcgcttatatccgcgtcatcgggggcgggtcttttgctggctccgccctttctgacgtagaactcatgcgtcacctcagtcacgtgatcactagcccagcggaagaactctttgacttcctgctttgtcaccttgccaaagtcgtgttccagacggcgggtgagttcaaatttgaacatccggtcctgcaacggttgctggtgctcgaaggtggtgctgttcccgtcgatcacggcgcacatgttggtgttggaggtgacgatcacgggggtgggatcgatctgggcggacgacttgcacttttggtccacgcgcaccttgctgccgccgagaatggccttggcggactccacgaccttggccgtcatcttgccctcctcccaccagatcaccatcttgtcgacgcaatcgttgaagggaaagttctcattggtccagttgacgcagcaagggcgaattc

SEQ ID NO: 431 - DNA, 3095 bp, Adeno-associated virus
gaattcgcccttcgcagagaccaaagttcaactgaaacgaatcaaccggtttattgattaacaagcaattacagattacgggtgaggtaacgagtgccaatggggcgaggctcagtataaacaccatcagggttcacagcaaattcaacattattagacttggcataattggaagtatactgaatttctgggttccagcgcttgctgttttctttctgcagctcccactcgatttccacgctgacttgtccggtgctgtactgcgtgatgaaggaggcaaacttggcaggagtaaacacctccggaggattagcaggtacaggtgtgtttttgatcaggatctgtggaggcgggtgttcgagtccaaaaccgcccatcagaggagacgggtgaaagttgccatccgtgtgaggaattttggcccagatgggaccctgcagatacacgtcccggttctgccagaccatgccaggcagtgctccctggctgttgatagtctgtgattgaggcccggctgtagacgactgcaggttgctggagaccacaccgtattcttctgtagccacagggttagtggtcttgatctcctcctcgctggtcatcagaacgttttccagcgtagttttgttggcagctcccgtcttgccaaaaaccagtaccccgttgatgggaaagaactggtcctcatcatccttgttggttgccatgggaatgccaggattggtcaaagagtttctgccattcagatgatatttagtggcagcagtccaggcaaaattgctgttgttgttaaagtccaagttctttgacagtctctgttgcctatagcagggtccaggcagccagttctttgactgctcggccatagtattgggcccagcttgatgaaattgcagttccctggtggaacccgtggtgctctgggtccgggccaggtagtacaggtactggtcgatgagagggttcatcagccggtctaggctctggctgtgcgcgtagctgctgtggaaaggcacgtcctcgaagctgtaactgaactcaaagttgttgcccgttctcagcatttgagaggggaaatattccaggcagtagaaggaggaacggcccaccgattggctgccgttgttcagagtcaggtagccgtactgaggaatcatgaagacgtccgccgggaacggaggcaggcagccctggtgcgcagagccgaggacgtacggcagctggtattccgagtccgagaagacctgaaccgtgctggtaaggttattagcgatggtcgtgacgccgtcattcgttgtgacctccttgacctggatgttgaagagcttgaaccgcagcttcttgggccggaatccccagttgttgttgatgagtcgctgccagtcacgtggtgagaagtggcagtggaatctgttaaagtcaaaatacccccagggggtgctgtagccgaagtagtggttgtcattggtggctcctgagctgctgctggagatttgcttgtagaggtggttgttgtaggtggggagggcccaggttctggtgctggtggtgatgactctgtcgcccagccatgtggaatcgcaatgccaatttcctgaggcattacccactccgtcggcaccttcgttattgtctgccgttggtgcgccaccgcctgcagccattgtaccagatcccacactagagggcgctgctggaggttctccaagaggttgagggtcggggactgactctgagtcgccagtctgaccaaaattgagcttctttttagcgggctgctggccttttttgccgatgcccgtggaggagtctggagagtctatgggtctcttctttccaggagccgtcttagcgccttcctcaaccagaccgagaggttcgagaacccgcttcttggcctggaagactgctcgcccgaggttgcccccaaatgacgtatcttcttgcaggcgctcctgaaactcggcgtcggcgtggttataccgcaggtacggattgtcacccgctttgagctgctggtcgtaggccttgtcgtgctcgagggccgctgcgtccgccgcgttgacgggctcccccttgtcgagtccgttgaagggtccgaggtacttgtagccaggaagcaccagaccccggccgtcgtcctgcttttgctggttggctttgggtttcggggctccaggtttcaggtcccaccactcgcgaatgccctcagagaggttgtcctcgagccaatctggaagataaccatcggcagccatacctggtttaagccatttattgctcagaaacacagtcgtccaggtccacgttgaccaggtcgcaggccgagcaggcaatctcgggtgcccgccccagcagatgatgaatcgcacacagcttccgatacgtcttttttctgacgaccggttgagattctgacacgccggggaaacattctaaacagtctctgaccccgtgcgtgaagcaaatgttgaaattctgattcattctctcgcacgttttgcagggaaacagcatctgaagcatgcccgcgtggcgagaacatttgttttggtacctgtcggcaaagtccaccggagctccttccgcgtctgacgtcgatgggtccgtgactgagggacaggcccgcttgggctcgcttatatccgcgtcatcgggggcgggtcttttgctggctccgccctttctgacgtagaactcatgcgtcacctcagtcacgtgatcactagcccagcggaagaactctttgacttcctgctttgtcaccttgccaaagtcgtgttccagacggcgggtgagttcaaatttgaacatccggtcctgcaacggctgctggtgctcgaaggtggtgctgttcccgtcgatcacggcgcgcatgttggtgttggaggtgacgatcacgggggtgggatcgatctgggcggacgacttgcacttttggtccacgcgcaccttgctgccgccgagaatggccttggcggactccacgaccttggccgtcatcttgccctcctcccaccagatcaccatcttgtcgacgcaatcgttgaagggaaagttctcattggtccagttgacgcagcaagggcgaattc

SEQ ID NO: 432 - protein, 729 aa, Adeno-associated virus; identical to SEQ ID NO: 160

SEQ ID NO: 433 - protein, 729 aa, Adeno-associated virus
MAADGYLPDWLEDNLSEGIREWWDLKPGAPKPKANQQKQDDGRGLVLPGYKYLGPFNGLDKGEPVNAADAAALEHDKAYDQQLKAGDNPYLRYNHADAEFQERLQEDTSFGGNLGRAVFQAKKRVLEPLGLVEEGAKTAPGKKRPIDSPDSSTGIGKKGQQPAKKKLNFGQTGDSESVPDPQPLGEPPAAPSSVGSGTMAAGGGAPTADNNEGADGVGNASGNWHCDSTWLGDRVITTSTRTWALPTYNNHLYKQISSSSSGATNDNHYFGYSTPWGYFDFNRFHCHFSPRDWQRLINNNWGFRPKKLRFKLFNIQVKEVTTNDGVTTIANNLTSTVQVFSDSEYQLPYVLGSAHQGCLPPFPADVFMIPQYGYLTLNNGSQSVGRSSFYCLEYFPSQMLRTGNNFEFSYSFEDVPFHSSYAHSQSLDRLMNPLIDQYLYYLARTQSTTGSTRELQFHQAGPNTMAEQSKNWLPGPCYRQQRLSKNLDFNNNSNFAWTAATKYHLNGRNSLTNPGIPMATNKDDEDQFFPINGVLVFGKTGAANKTTLENVLMTSEEEIKTTNPVATEEYGVVSSNLQSSTAGPQSQTINSQGALPGMVWQNRDVYLQGPIWAKIPHTDGNFHPSPLMGGFGLKHPPPQILIKNTPVPANPPEVFTPAKFASFITQYSTGQVSVEIEWELQKENSKRWNPEIQYTSNYAKSNNVEFAVNPDGVYTEPRPIGTRYLTRNL

SEQ ID NO: 434 - protein, 729 aa, Adeno-associated virus
MAADGYLPDWLEDNLSEGIREWWDLKPGAPKPKANQQKQDDGRGLVLPGYKYLGPFNGLDKGEPVNAADAAALEHDKAYDQQLKAGDNPYLRYNHADAEFQERLQEDTSFGGNLGRAVFQAKKRVLEPLGLVEEGAKTAPGKKRPIDSPDSSTGIGKKGQQPAKKKLNFGQTGDSESVPDPQPLGEPPAAPSSVGSGTMAAGGGAPMADNNEGADGVGNASGNWHCDSTWLGDRVITTSTRTWALPTYNNHLYKQISSSSSGATNDNHYFGYSTPWGYFDFNRFHCHFSPRDWQRLINNNWGFRPKKLRFKLFNIQVKEVTTNDGVTTIANNLTSTVQVFSDSEYQLPYVLGSAHQGCLPPFPADVFMIPQYGYLTLNNGSQSVGRSSFYCLEYFPSQMLRTGNNFEFSYSFEDVPFHSSYAHSQSLDRLMNPLIDQYLYYLARTQSTTGSTRELQFHQAGPNTMAEQSKNWLPGPCYRQQRLSKNLDFNNNSNFAWTAATKYHLNGRNSLTNPGIPMATNKDDEDQFFPINGVLVFGKTGAANKTTLENVLMTSEEEIKTTNPVATEEYGVVSSNLQSSTAGPQSQTINSQGALPGMVWQNRDVYLQGPIWAKIPHTDGNFHPSPLMGGFGLKHPPPQILIKNTPVPANPPEVFTPAKFASFITQYSTGQVSVEIEWELQKENSKRWNPEIQYTSNYAKSNNVEFAVNPDGVYTEPRPIGTRYLTRNL

SEQ ID NO: 435 - DNA, 2217 bp, Adeno-associated virus
atggctgctgacggttatcttccagattggctcgaggacaacctctctgagggcattcgcgagtggtgggacctgaaacctggagcccccaagcccaaggccaaccagcagaagcaggacgacggccggggtctggtgcttcctggctacaagtacctcggacccttcaacggactcgacaagggggagcccgtcaacgcggcggacgcagcggccctcgagcacgacaaggcctacgaccagcagctcaaagcgggtgacaatccgtacctgcggtataaccacgccgacgccgagtttcaggagcgtctacaagaagatacgtcttttgggggcaacctcgggcgagcagtcttccaggccaagaagcgggttctcgaacctctcggtctggttgaggaagctgctaagacggctcctggaaagaagagaccggtagaaccgtcacctcagcgttcccccgactcctccacgggcatcggcaagaaaggccagcggcccgctaaaaagagactgaactttggtcagactggcgactcagagtcagtccccgaccctcaaccaatcggagaaccaccagcaggcccctctggtctgggatctggtacaatggctgcaggcggtggcgctccaatggcagacaataacgaaggcgccgacggagtgggtagttcctcaggaaattggcattgcgattccacatggctgggcgacagagtcatcaccaccagcacccgaacctgggccctgcccacctacaacaaccacctctacaagcaaatatccaatgggacatcgggaggaagcaccaacgacaacacctacttcggctacagcaccccctgggggtattttgacttcaacagattccactgccacttctcaccacgtgactggcagcgactcatcaacaacaactggggattccggccaaaaagactcagcttcaagcccttcaacatccaggtcaaggaggtcacgcagaatgaaggcaccaagaccatcgccaataaccttaccagcacgattcaggtatttacggactcggaataccagctgccgtacgtcctcggctccgcgcaccagggctgcctgcctccgttcccggcggacgtcttcatgattccccagtacggctaccttacactgaacaatggaagtcaagccgtaggccgttcctccttctactgcctggaatattttccatctcaaatgctgcgaactggaaacaattttgaattcagctacaccttcgaggacgtgcctttccacagcagctacgcacacagccagagcttggaccgactgatgaatcctctcatcgaccagtacctgcactacttatccagaactcagtccacaggaggaactcaaggtacccagcaattgttattttctcaagctgggcctgcaaacatgtcggctcaggctaagaactggctacctggaccttgctaccggcagcagcgagtctctacgacactgtcgcaaaacaacaacagcaactttgcttggactggtgccaccaaatatcacctgaacggaagagactctttggtaaatcccggtgtcgccatggcaacccacaaggacgacgaggaacgcttcttcccgtcgagtggagtcctgatgtttggaaaacagggtgctggaagagacaatgtggactacagcagcgttatgctaaccagcgaagaagaaattaaaaccactaaccctgtagccacagaacaatacggtgtggtggctgacaacttgcagcaaaccaatacagggcctattgtgggaaatgtcaacagccaaggagccttacctggcatggtctggcagaaccgagacgtgtacctgcagggtcccatctgggccaagattcctcacacggacggcaacttccacccttcaccgctaatgggaggatttggactgaagcacccacctcctcagatcctgatcaagaacacgccggtacctgcggatcctccaacaacgttcagccaggcgaaattggcttccttcattacgcagtacagcaccggacaggtcagcgtggaaatcgagtgggagctgcagaaggagaacagcaaacgctggaacccagagattcagtacacttcaaactactacaaatctacaaatgtggactttgctgtcaatacagagggaacttattctgagcctcgccccattggtactcgctacctcacccgtaatctgtaa

SEQ ID NO: 436 - protein, 738 aa, Adeno-associated virus
MAADGYLPDWLEDNLSEGIREWWDLKPGAPKPKANQQKQDDGRGLVLPGYKYLGPFNGLDKGEPVNAADAAALEHDKAYDQQLKAGDNPYLRYNHADAEFQERLQEDTSFGGNLGRAVFQAKKRVLEPLGLVEEAAKTAPGKKRPVEPSPQRSPDSSTGIGKKGQRPAKKRLNFGQTGDSESVPDPQPIGEPPAGPSGLGSGTMAAGGGAPMADNNEGADGVGSSSGNWHCDSTWLGDRVITTSTRTWALPTYNNHLYKQISNGTSGGSTNDNTYFGYSTPWGYFDFNRFHCHFSPRDWQRLINNNWGFRPKRLSFKPFNIQVKEVTQNEGTKTIANNLTSTIQVFTDSEYQLPYVLGSAHQGCLPPFPADVFMIPQYGYLTLNNGSQAVGRSSFYCLEYFPSQMLRTGNNFEFSYTFEDVPFHSSYAHSQSLDRLMNPLIDQYLHYLSRTQSTGGTQGTQQLLFSQAGPANMSAQAKNWLPGPCYRQQRVSTTLSQNNNSNFAWTGATKYHLNGRDSLVNPGVAMATHKDDEERFFPSSGVLMFGKQGAGRDNVDYSSVMLTSEEEIKTTNPVATEQYGVVADNLQQTNTGPIVGNVNSQGALPGMVWQNRDVYLQGPIWAKIPHTDGNFHPSPLMGGFGLKHPPPQILIKNTPVPADPPTTFSQAKLASFITQYSTGQVSVEIEWELQKENSKRWNPEIQYTSNYYKSTNVDFAVNTEGTYSEPRPIGTRYLTRNL

SEQ ID NO: 437 - DNA, 2217 bp, Adeno-associated virus
atggctgctgacggttatcttccagattggctcgaggacaacctctctgagggcattcgcgagtggtgggacctgaaacctggagcccccaagcccaaggccaaccagcagaagcaggacgacggccggggtctggtgcttcctggctacaagtacctcggacccttcaacggactcgacaagggggagcccgtcaacgcggcggacgcagcggccctcgagcacgacaaggcctacgaccagcagctcaaagcgggtgacaatccgtacctgcggtataaccacgccgacgccgagtttcaggagcgtctgcaagaagatacgtcttttgggggcaacctcgggcgagcagtcttccaggccaagaagcgggttctcgaacctctcggtctggttgaggaagctgctaagacggctcctggaaagaagagaccggtagaaccgtcacctcagcgttcccccgactcctccacgggcatcggcaagaaaggccagcagcccgctaaaaagagactgaactttggtcagactggcgactcagagtcagtccccgaccctcaaccaatcggagaaccaccagcaggcccctctggtctgggatctggtacaatggctgcaggcggtggcgctccaatggcagacaataacgaaggcgccgacggagtgggtagttcctcaggaaattggcattgcgattccacatggctgggcgacagagtcatcaccaccagcacccgaacctgggccctgcccacctacaacaaccacctctacaagcaaatatccaatgggacatcgggaggaagcaccaacgacaacacctacttcggctacagcaccccctgggggtattttgacttcaacagattccactgccacttctcaccacgtgactggcagcgactcatcaacaacaactggggattccggccaaaaagactcagcttcaagctcttcaacatccaggtcaaggaggtcacgcagaatgaaggcaccaagaccatcgccaataaccttaccagcacgattcaggtatttacggactcggaataccagctgccgtacgtcctcggctccgcgcaccagggctgcctgcctccgttcccggcggacgtcttcatgattccccagtacggctaccttacactgaacaatggaagtcaagccgtaggccgttcctccttctactgcctggaatattttccatctcaaatgctgcgaactggaaacaattttgaattcagctacaccttcgaggacgtgcctttccacagcagctacgcacacagccagagcttggaccgactgatgaatcctctcatcgaccagtacctgtactacttatccagaactcagtccacaggaggaactcaaggtacccagcaattgttattttctcaagctgggcctgcaaacatgtcggctcaggctaagaactggctacctggaccttgctaccggcagcagcgagtctctacgacactgtcgcaaaacaacaacagcaactttgcttggactggtgccaccaaatatcacctgaacggaagagactctttggtaaatcccggtgtcgccatggcaacccacaaggacgacgaggaacgcttcttcccgtcgagtggagtcctgatgtttggaaaacagggtgctggaagagacaatgtggactacagcagcgttatgctaaccagcgaagaagaaattaaaaccactaaccctgtagccacagaacaatacggtgtggtggctgataacttgcagcaaaccaatacggggcctattgtgggaaatgtcaacagccaaggagccttacctggcatggtctggcagaaccgagacgtgtacctgcagggtcccatctgggccaagattcctcacacggacggcaacttccacccttcaccgctaatgggaggatttggactgaagcacccacctcctcagatcctgatcaagaacacgccggtacctgcggatcctccaacaacgttcagccaggcgaaattggcttccttcattacgcagtacagcaccggacaggtcagcgtggaaatcgagtgggagctgcagaaggagaacagcaaacgctggaacccagagattcagtacacttcaaactactacaaatctacaaatgtggactttgctgtcaatacagagggaacttattctgagcctcgccccattggtactcgttacctcacccgtaatctgtaa

SEQ ID NO: 438 - protein, 738 aa, Adeno-associated virus; identical to SEQ ID NO: 90

SEQ ID NO: 439 - protein, 738 aa, Adeno-associated virus
MAADGYLPDWLEDNLSEGIREWWDLKPGAPKPKANQQKQDDGRGLVLPGYKYLGPFNGLDKGEPVNAADAAALEHDKAYDQQLKAGDNPYLRYNHADAEFQERLQEDTSFGGNLGRAVFQAKKRVLEPLGLVEEAAKTAPGKKRPVEPSPQRSPDSSTGIGKKGQQPAKKRLNFGQTGDSESVPDPQPIGEPPAGPSGLGSGTMAAGGGAPMADNNEGADGVGSSSGNWHCDSTWLGDRVITTSTRTWALPTYNNHLYKQISNGTSGGSTNDNTYFGYSTPWGYFDFNRFHCHFSPRDWQRLINNNWGFRPKRLSFKLFNIQVKEVTQDEGTKTIANNLTSTIQVFTDSEYQLPYVLGSAHQGCLPPFPADVFMIPQYGYLTLNNGSQAVGRSSFYCLEYFPSQMLRTGNNFEFSYTFEDVPFHSSYAHSQSLDRLMNPLIDQYLYYLSRTQSTGGTQGTQQLLFSQAGPANMSARAKNWLPGPCYRQQRVSTTLSQNNNSNFAWTGATKYHLNGRDSLVNPGVAMATHKDDEERFFPSSGVLMFGKQGAGRDNVDYSSVMLTSEEEIKTTNPVATEQYGVVADNLQQANTGPIVGNVNSQGALPGMVWQNRDVYLQGPIWAKIPHTDGNFHPSPLMGGFGLKHPPPQILIKNTPVPADPPTTFSQAKLASFITQYSTGQVSVEIEWELQKENSKRWNPEIQYTSNYYKSTNVDFAVNSEGTYSEPRPIGTRYLTRNL

SEQ ID NO: 440 - DNA, 2217 bp, Adeno-associated virus
atggctgctgacggttatcttccagattggctcgaggacaacctctctgagggcattcgcgagtggtgggacctgaaacctggagcccccaagcccaaggccaaccagcagaagcaggacgacggccggggtctggtgcttcctggctacaagtacctcggacccttcaacggactcgacaagggggagcccgtcaacgcggcggacgcagcggccctcgagcacgacaaggcctacgaccagcagctcaaagcgggtgacaatccgtacctgcggtataaccacgccgacgccgagtttcaggagcgtctgcaagaagatacgtcttttgggggcaacctcgggcgagcagtcttccaggccaagaagcgggttctcgaacctctcggtctggttgaggaagctgctaagacggctcctggaaagaagagaccggtagaaccgtcacctcagcgttcccccgactcctccacgggcatcggcaagaaaggccagcagcccgctaaaaagagactgaactttggtcagactggcgactcagagtcagtccccgaccctcaaccaatcggagaaccaccagcaggcccctctggtctgggatctggtacaatggctgcaggcggtggcgctccaatggcagacaataacgaaggcgccgacggagtgggtagttcctcaggaaattggcattgcgattccacatggctgggcgacagagtcatcaccaccagcacccgaacctgggccctgcccacctacaacaaccacctctacaagcaaatatccaatgggacatcgggaggaagcaccaacgacaacacctacttcggctacagcaccccctgggggtattttgacttcaacagattccactgccacttctcaccacgtgactggcagcgactcatcaacaacaactggggattccggccaaaaagactcagcttcaagctcttcaacatccaggtcaaggaggtcacgcaggatgaaggcaccaagaccatcgccaataaccttaccagcacgattcaggtatttacggactcggaataccagctgccgtacgtcctcggctccgcgcaccagggctgcctgcctccgttcccggcggacgtcttcatgattccccagtacggctaccttacactgaacaatggaagtcaagccgtaggccgttcctccttctactgcctggaatattttccatctcaaatgctgcgaactggaaacaattttgaattcagctacaccttcgaggacgtgcctttccacagcagctacgcacacagccagagcttggaccgactgatgaatcctctcatcgaccagtacctgtactacttatccagaactcagtccacaggaggaactcaaggtacccagcaattgttattttctcaagctgggcctgcaaacatgtcggctcgggctaagaactggctacctggaccttgctaccggcagcagcgagtctctacgacactgtcgcaaaacaacaacagcaactttgcttggactggtgccaccaaatatcacctgaacggaagagactctttggtaaatcccggtgttgctatggcaacgcataaggacgacgaggaacgtttctttccatcgagcggagtcctgatgtttggaaaacagggtgctggaagagacaatgtggactatagcagcgttatgctaaccagcgaggaagaaattaaaaccactaaccctgtagccacagaacaatacggtgtggtggctgacaacttgcagcaagccaatacagggcctattgtgggaaatgtcaacagccaaggagccttacctggcatggtctggcagaaccgagacgtgtacctgcagggtcccatctgggccaaaattcctcacacggacggcaattttcacccgtctcctctgatgggcggctttggactgaagcacccacctccccagatcctgatcaagaatacgccggtacctgcggatcctccaacgacgttcagccaggcaaaattggcttccttcatcacgcagtacagcaccggccaggtcagcgtggagatcgagtgggagctgcagaaggagaacagcaagcgatggaacccagaaattcagtacacttccaactactacaaatctacaaatgtggactttgctgtcaattctgagggtacatattcagagcctcgccccattggtactcgttatctgacacgtaatctgtaa

SEQ ID NO: 441 - DNA, 2211 bp, Adeno-associated virus
atggctgccgatggttatcttccagattggctcgaggacaacctctctgagggcattcgcgagtggtgggacttgaaacctggagccccgaaacccaaagccaaccagcaaaagcaggacgacggccggggcctggtgcttcctggctacaagtacctcggacccttcaacggactcgacaagggggagcccgtcaacgcggcggacgcagcggccctcgagcacgacaaggcctacgaccagcagctcgaagcgggtgacaatccgtacctgcggtataaccacgccgacgccgagtttcaggagcgtctgcaagaagatacgtcttttgggggcaacctcgggcgagcagtcttccaggccaagaagcgggttctcgaacctctcggtctggttgaggaaggcgctaagacggctcctggaaagaagagaccagtagagcagtcaccccaagaaccagactcctcctcgggcatcggcaagaaaggccaacagcccgccagaaaaagactcaattttggccagactggcgactcagagtcagttccagaccctcaacctctcggagaacctccagcagcgccctctggtgtgggacctaatacaatggctgcaggcggtggcgcaccaatggcagacaataacgaaggcgccgacggagtgggtagttcctcgggaaattggcattgcgattccacatggctgggcgacagagtcatcaccaccagcacccgaacctgggccctgcccacctacaacaaccacctctacaagcaaatctccaacgggacatcgggaggagccaccaacgacaacacctacttcggctacagcaccccctgggggtattttgactttaacagattccactgccacttttcaccacgtgactggcagcgactcatcaacaacaactggggattccggcccaagagactcagcttcaagctcttcaacatccaggtcaaggaggtcacgcagaatgaaggcaccaagaccatcgccaataacctcaccagcaccatccaggtgtttacggactcggagtaccagctgccgtacgttctcggctctgcccaccagggctgcctgcctccgttcccggcggacgtgttcatgattccccagtacggctacctaacactcaacaacggtagtcaggccgtgggacgctcctccttctactgcctggaatactttccttcgcagatgctgagaaccggcaacaacttccagtttacttacaccttcgaggacgtgcctttccacagcagctacgcccacagccagagcttggaccggctgatgaatcctctgattgaccagtacctgtactacttgtctcggactcaaacaacaggaggcacggcaaatacgcagactctgggcttcagccaaggtgggcctaatacaatggccaatcaggcaaagaactggctgccaggaccctgttaccgccaacaacgcgtctcaacgacaaccgggcaaaacaacaatagcaactttgcctggactgctgggaccaaataccatctgaatggaagaaattcattggctaatcctggcatcgctatggcaacacacaaagacgacgaggagcgttttttcccagtaacgggatcctgtttttggcaacaaaatgctgccagagacaatgcggattacagcgatgtcatgctcaccagcgaggaagaaatcaaaaccactaaccctgtggctacagaggaatacggtatcgtggcagataacttgcagcagcaaaacacggctcctcaaattggaactgtcaacagccagggggccttacccggtatggtctggcagaaccgggacgtgtacctgcagggtcccatctgggccaagattcctcacacggacggcaacttccacccgtctccgctgatgggcggctttggcctgaaacatcctccgcctcagatcctgatcaagaacacgcctgtacctgcggatcctccgaccaccttcaaccagtcaaagctgaactctttcatcacgcaatacagcaccggacaggtcagcgtggaaattgaatgggagctacagaaggaaaacagcaagcgctggaaccccgagatccagtacacctccaactactacaaatctacaagtgtggactttgctgttaatacagaaggcgtgtactctgaaccccgccccattggcacccgttacctcacccgtaatctgtaa

SEQ ID NO: 442 - protein, 736 aa, Adeno-associated virus
MAADGYLPDWLEDNLSEGIREWWDLKPGAPKPKANQQKQDDGRGLVLPGYKYLGPFNGLDKGEPVNAADAAALEHDKAYDQQLEAGDNPYLRYNHADAEFQERLQEDTSFGGNLGRAVFQAKKRVLEPLGLVEEGAKTAPGKKRPVEQSPQEPDSSSGIGKKGQQPARKRLNFGQTGDSESVPDPQPLGEPPAAPSGVGPNTMAAGGGAPMADNNEGADGVGSSSGNWHCDSTWLGDRVITTSTRTWALPTYNNHLYKQISNGTSGGATNDNTYFGYSTPWGYFDFNRFHCHFSPRDWQRLINNNWGFRPKRLSFKLFNIQVKEVTQNEGTKTIANNLTSTIQVFTDSEYQLPYVLGSAHQGCLPPFPADVFMIPQYGYLTLNNGSQAVGRSSFYCLEYFPSQMLRTGNNFQFTYTFEDVPFHSSYAHSQSLDRLMNPLIDQYLYYLSRTQTTGGTANTQTLGFSQGGPNTMANQAKNWLPGPCYRQQRVSTTTGQNNNSNFAWTAGTKYHLNGRNSLANPGIAMATHKDDEERFFPVTGSCFWQQNAARDNADYSDVMLTSEEEIKTTNPVATEEYGIVADNLQQQNTAPQIGTVNSQGALPGMVWQNRDVYLQGPIWAKIPHTDGNFHPSPLMGGFGLKHPPPQILIKNTPVPADPPTTFNQSKLNSFITQYSTGQVSVEIEWELQKENSKRWNPEIQYTSNYYKSTSVDFAVNTEGVYSEPRPIGTRYLTRNL

SEQ ID NO: 443 - DNA, 2214 bp, Adeno-associated virus
atggctgctgacggttatcttccagattggctcgaggacaacctctctgagggcattcgcgagtggtgggacctgaaacctggagcccccaagcccaaggccaaccagcagaagcaggacgacggccggggtctggtgcttcctggctacaagtacctcggacccttcaacggactcgacaagggggagcccgtcagcgcggcggacgcagcggccctcgagcacgacaaggcctgcgaccagcggctcaaagcgggtgacaatccgtacctgcggtataaccacgccgacgccgagtttcaggagcgtctgcaagaagatacgtcttttgggggcaacctcgggcgagcagtcttccaggccaagaagcgggttctcgaacctctcggtctggttgaggaagctgctaagacggctcctggaaagaagggaccggtagaaccgtcacctcagcgttcccccgactcctccacgggcatcggcaagaaaggccagcagcccgctagaaagagactgaactttgggcagactggcgactcagagtcagtccccgaccctcaaccaatcggagaaccaccagcaggcccctctggtctgggatctggtacaatggctgcaggcggtggcgcaccaatggctgacaataacgagggcgccgacggagtgggtaatgcctcaggaaattggcattgcgattccacatggctgggcgacagagtcatcaccaccagcacccgaacctgggctttgcccacctacaacaatcacctctacaagcaaatctccagtcagtcagcaggtagcaccaacgacaacgtctacttcggctacagcaccccctgggggtattttgacttcaacagattccactgtcacttctcaccacgtgactggcagcggctcatcaacaacaactggggattccggcccaagaagctcaacttcaagctgttcaacatccaggtcaaggaggtcacaacgaatgacggcgtcacgaccatcgccaataaccttaccagcacggttcaggtcttttcggactcggaataccagctgccctacgtcctcggctccgcacaccagggctgcctgcctccgttcccggcggacgtcttcatgattccccagtacggctacctgactctgaacaatggcagccaatcggtgggtcgttcctctttctactgcctggaatatttcccttctcaaatgctgagaacgggcaacaacttcaccttcagctacaccttcgaggacgttcccttccacagcagctacgcacacagccagagcctggaccggctgatgaatcctcttatcgaccagtacctgtattacctggccagaacacagagcaacgcaggaggcacagctggcaatcgggaactgcagttttatcagggcgggcctaccaccatggccgaacaagccaaaaactggctgcctggaccttgcttccggcaacaaagagtctccaagacgctggatcaaaacaacaacagcaactttgcttggactggtgccaccaaataccatctaaatggaagaaattcattggttaatcccggtgtcgccatggcaacccacaaggacgacgaggaacgcttcttcccttcgagcggagtcctgatttttggaaaaactggagcagctaataagactacactggaaaatgtgttaatgacaaatgaagaggaaattcgtcctaccaacccggtagccaccgaggaatacgggactgttagcagcaacctgcaggcggctaacactgcagcccagacacaagttgtcaacaaccagggagccttacctggtatggtctggcagaaccgggacgtgtacctgcagggtcccatctgggccaagattcctcacacggacggcaactttcacccgtctccgctgatgggcggctttggactgaagcatccgcctcctcagatcctgatcaaaaacactcctgttcctgctaatcccccggaggtgtttacgcctgccaagtttgcttctttcatcacacagtacagcaccggccaggtcagcgtggagatcgagtgggagctgcagaaggagaacagcaagcgctggaacccagagattcagtatacctccaattttgacgaacagactggtgtggactttgccgttgacagccagggtgtttattctgagcctcgccccattggtactcgttacctcacccgtaatctgtaa

SEQ ID NO: 444 - protein, 737 aa, Adeno-associated virus
MAADGYLPDWLEDNLSEGIREWWDLKPGAPKPKANQQKQDDGRGLVLPGYKYLGPFNGLDKGEPVSAADAAALEHDKACDQRLKAGDNPYLRYNHADAEFQERLQEDTSFGGNLGRAVFQAKKRVLEPLGLVEEAAKTAPGKKGPVEPSPQRSPDSSTGIGKKGQQPARKRLNFGQTGDSESVPDPQPIGEPPAGPSGLGSGTMAAGGGAPMADNNEGADGVGNASGNWHCDSTWLGDRVITTSTRTWALPTYNNHLYKQISSQSAGSTNDNVYFGYSTPWGYFDFNRFHCHFSPRDWQRLINNNWGFRPKKLNFKLFNIQVKEVTTNDGVTTIANNLTSTVQVFSDSEYQLPYVLGSAHQGCLPPFPADVFMIPQYGYLTLNNGSQSVGRSSFYCLEYFPSQMLRTGNNFTFSYTFEDVPFHSSYAHSQSLDRLMNPLIDQYLYYLARTQSNAGGTAGNRELQFYQGGPTTMAEQAKNWLPGPCFRQQRVSKTLDQNNNSNFAWTGATKYHLNGRNSLVNPGVAMATHKDDEERFFPSSGVLIFGKTGAANKTTLENVLMTNEEEIRPTNPVATEEYGTVSSNLQAANTAAQTQVVNNQGALPGMVWQNRDVYLQGPIWAKIPHTDGNFHPSPLMGGFGLKHPPPQILIKNTPVPANPPEVFTPAKFASFITQYSTGQVSVEIEWELQKENSKRWNPEIQYTSNFDEQTGVDFAVDSQGVYSEPRPIGTRYLTRNL

SEQ ID NO: 445 - DNA, 2214 bp, Adeno-associated virus
atggctgccgatggttatcttccagattggctcgaggacaacctctctgagggcattcgcgagtggtgggacctgaaacctggagccccgaaacccaaagccaaccagcaaaagcaggacgacggccggggtctggtgcttcctggctacaagtacctcggacccttcaacggactcgacaagggggagcccgtcaacgcggcggacgcagcggccctcgagcacgacaaggcctacgaccagcagctcaaagcgggtgacaatccgtacctgcggtataaccacgccgacgccgagtttcaggagcgtctgcaagaagatacgtcttttgggggcaacctcgggcgagcagtcttccaggccaagaagcgggttctcgaacctctcggtctggttgaggaagctgctaagacggctcctggaaagaagagaccggtagaaccgtcacctcagcgttcccccgactcctccacgggcatcggcaagaaaggccagcagcccgctagaaagagactgaactttgggcagactggcgactcagagtcagtccccgaccctcaaccaatcggagaaccaccagcaggcccctctggtctgggatctggtacaatggctgcaggcggtggcgctccaatggcagacaataacgaaggcgccgacggagtgggtaatgcctcaggaaattggcattgcgattccacatggctgggcgacagagtcatcaccaccagcacccgaacctgggctttgcccacctacaacaaccacctctacaagcaaatctccagtcagtcagcaggtagcaccaacgacaacgtctacttcggctacagcaccccctgggggtattttgacttcaacagattccactgtcacttctcaccacgtgactggcagcggctcatcaacaacaactggggattccggcccaagaagctcaacttcaagctgttcaacatccaggtcaaggaggtcacaacgaatgacggcgtcacgaccatcgccaataaccttaccagcacggttcaggtcttttcggactcggaataccagctgccctacgtcctcggctccgcacaccagggctgcctgcctccgttcccggcggacgtcttcatgattcctcagtacggctacctgactctcaacaacggtagtcaggccgtgggacgttcctccttctactgcctggagtacttcccctctcagatgctgagaacgggcaacaacttttccttcagctacactttcgaggacgtgcctttccacagcagctacgcgcacagccagagtttggacaggctgatgaatcctctcatcgaccagtacctgtactacctgtcaagaacccagtctacgggaggcacagcgggaacccagcagttgctgttttctcaggccgggcctagcaacatgtcgactcaggccagaaactggctgcctggaccctgctacagacagcagcgcgtctccacgacactgtcgcaaaacaacaacagcaactttgcctggactggtgccaccaagtatcatctgaacggcagagactctctggtgaatccgggcgtcgccatggcaaccaacaaggacgacgaggaccgcttcttcccatccagcggcatcctcatgtttggcaagcagggagctggaaaagacaacgtggactatagcaacgtgatgctaaccagcgaggaagaaatcaagaccaccaaccccgtggccacagaacagtatggcgtggtggctgataacctacagcagcaaaacaccgctcctattgtgggggccgtcaacagccagggagccttacctggcatggtctggcagaaccgggacgtgtacctgcagggtcctatttgggccaagattcctcacacagatggcaactttcacccgtctcctttaatgggcggctttggacttaaacatccgcctcctcagatccttatcaaaaacactcctgttcctgcggatcctccaacagcgttcaaccaggccaagctgaattctttcatcacgcagtacagcaccggacaagtcagcgtggagatcgagtgggagctgcagaaggagaacagcaagcgctggaacccagagattcagtatacttccaactactacaaatctacaaatgtggactttgctgttaatactgagggtgcttactctgagcctcgccccattggcactcgttacctcacccgtaatctgtaa

SEQ ID NO: 446 - protein, 737 aa, Adeno-associated virus
MAADGYLPDWLEDNLSEGIREWWDLKPGAPKPKANQQKQDDGRGLVLPGYKYLGPFNGLDKGEPVNAADAAALEHDKAYDQQLKAGDNPYLRYNHADAEFQERLQEDTSFGGNLGRAVFQAKKRVLEPLGLVEEAAKTAPGKKRPVEPSPQRSPDSSTGIGKKGQQPARKRLNFGQTGDSESVPDPQPIGEPPAGPSGLGSGTMAAGGGAPMADNNEGADGVGNASGNWHCDSTWLGDRVITTSTRTWALPTYNNHLYKQISSQSAGSTNDNVYFGYSTPWGYFDFNRFHCHFSPRDWQRLINNNWGFRPKKLNFKLFNIQVKEVTTNDGVTTIANNLTSTVQVFSDSEYQLPYVLGSAHQGCLPPFPADVFMIPQYGYLTLNNGSQAVGRSSFYCLEYFPSQMLRTGNNFSFSYTFEDVPFHSSYAHSQSLDRLMNPLIDQYLYYLSRTQSTGGTAGTQQLLFSQAGPSNMSTQARNWLPGPCYRQQRVSTTLSQNNNSNFAWTGATKYHLNGRDSLVNPGVAMATNKDDEDRFFPSSGILMFGKQGAGKDNVDYSNVMLTSEEEIKTTNPVATEQYGVVADNLQQQNTAPIVGAVNSQGALPGMVWQNRDVYLQGPIWAKIPHTDGNFHPSPLMGGFGLKHPPPQILIKNTPVPADPPTAFNQAKLNSFITQYSTGQVSVEIEWELQKENSKRWNPEIQYTSNYYKSTNVDFAVNTEGAYSEPRPIGTRYLTRNL

SEQ ID NO: 447 - DNA, 2217 bp, Adeno-associated virus
atggctgccgatggttatcttccagattggctcgaggacaacctctctgagggcattcgcgagtggtgggacctgaaacctggagccccgaaacccaaagccaaccagcaaaagcaggacgacggccggggtctggtgcttcctggctacaagtacctcggacccttcaacggactcgacaagggggagcccgtcaacgcggcggacgcagcggccctcgagcacgacaaggcctacgaccagcagctcaaagcgggtgacaatccgtacctgcggtataatcacgccgacgccgagtttcaggagcgtctgcaagaagatacgtcttttgggggcaacctcgggcgagcagtcttccaggccaagaagcgggttctcgaacctctcggtctggttgaggaaggcgctaagacggctcctggaaagaagagaccggtagagccgtcaccacagcgttcccccgactcctccacgggcatcggcaagaaaggccagcagcccgccagaaagagactcaatttcggtcagactggcgactcagagtcagtccccgaccctcaacctatcggagaacctccagcagcgccctctagtgtgggatctggtacaatggctgcaggcggtggcgcaccaatggcagacaataacgaaggtgccgacggagtgggtagttcctcgggaaattggcattgcgattccacatggctgggcgacagagtcatcaccaccagcacccgaacctgggccctgcccacctacaacaaccacctctacaagcaaatctccaacgggacctcgggaggcagcaccaacgacaacacctactttggctacagcaccccctgggggtattttgactttaacagattccactgccacttctcaccacgtgactggcagcgactcatcaacaacaactggggattccggcccaagagactcagcttcaagctcttcaacatccaggtcaaagaggtcacgcagaatgaaggcaccaagaccatcgccaataacctcaccagcaccatccaggtgtttacggactcggaataccagctgccgtacgtcctcggctctgcccaccagggctgcctgcctccgttcccggcggacgtcttcatgattcctcagtacggctacctgactctcaacaacggtagtcaggccgtgggacgttcctccttctactgcctggagtacttcccctctcagatgctgagaacgggcaacaacttttccttcagctacactttcgaggacgtgcctttccacagcagctacgcgcacagccagagtttggacaggctgatgaatcctctcatcgaccagtacctgtactacctgtcaagaacccagtctacgggaggcacagcgggaacccagcagttgctgttttctcaggccgggcctagcaacatgtcggctcaggccagaaactggctgcctggaccctgctacagacagcagcgcgtctccacgacactgtcgcaaaacaacaacagcaactttgcctggactggtgccaccaagtatcatctgaacggcagagactctctggtgaatccgggcgtcgccatggcaaccaacaaggacgacgaggaccgcttcttcccatccagcggcatcctcatgtttggcaagcagggagctggaaaagacaacgtggactatagcaacgtgatgctaaccagcgaggaagaaatcaaggccaccaaccccgtggccacagaacagtatggcgtggtggctgataacctacagcagcaaaacaccgctcctattgtgggggccgtcaacagccagggagccttacctggcatggtctggcagaaccgggacgtgtacctgcagggtcctatttgggccaagattcctcacacagatggcaactttcacccgtctcctttaatgggcggctttggacttaaacatccgcctcctcagatcctcatcaaaaacactcctgttcctgcggatcctccaacagcgttcaaccaggccaagctgaattctttcatcacgcagtacagcaccggacaagtcagcgtggagatcgagtgggagctgcagaaggagaacagcaagcgctggaacccagagattcagtatacttccaactactacaaatctacaaatgtggactttgctgttaatactgagggtgtttactctgagcctcgccccattggcactcgttacctcacccgtaatctgtaa

SEQ ID NO: 448 - protein, 738 aa, Adeno-associated virus
MAADGYLPDWLEDNLSEGIREWWDLKPGAPKPKANQQKQDDGRGLVLPGYKYLGPFNGLDKGEPVNAADAAALEHDKAYDQQLKAGDNPYLRYNHADAEFQERLQEDTSFGGNLGRAVFQAKKRVLEPLGLVEEGAKTAPGKKRPVEPSPQRSPDSSTGIGKKGQQPARKRLNFGQTGDSESVPDPQPIGEPPAAPSSVGSGTMAAGGGAPMADNNEGADGVGSSSGNWHCDSTWLGDRVITTSTRTWALPTYNNHLYKQISNGTSGGSTNDNTYFGYSTPWGYFDFNRFHCHFSPRDWQRLINNNWGFRPKRLSFKLFNIQVKEVTQNEGTKTIANNLTSTIQVFTDSEYQLPYVLGSAHQGCLPPFPADVFMIPQYGYLTLNNGSQAVGRSSFYCLEYFPSQMLRTGNNFSFSYTFEDVPFHSSYAHSQSLDRLMNPLIDQYLYYLSRTQSTGGTAGTQQLLFSQAGPSNMSAQARNWLPGPCYRQQRVSTTLSQNNNSNFAWTGATKYHLNGRDSLVNPGVAMATNKDDEDRFFPSSGILMFGKQGAGKDNVDYSNVMLTSEEEIKATNPVATEQYGVVADNLQQQNTAPIVGAVNSQGALPGMVWQNRDVYLQGPIWAKIPHTDGNFHPSPLMGGFGLKHPPPQILIKNTPVPADPPTAFNQAKLNSFITQYSTGQVSVEIEWELQKENSKRWNPEIQYTSNYYKSTNVDFAVNTEGVYSEPRPIGTRYLTRNL

SEQ ID NO: 449 - DNA, 2217 bp, Adeno-associated virus
atggctgccgatggttatcttccagattggctcgaggacaacctctctgagggcattcgcgagtggtgggacctgaaacctggagccccgaaacccaaagccaaccagcaaaagcaggacgacggccggggtctggtgcttcctggctacaagcacctcggacccttcaacggactcgacaagggggagcccgtcaacgcggcggacgcagcggccctcgagcacgacaaggcctacgaccagcagctcaaagcgggtgacaatccgtacctgcggtataatcacgctgacgccgagtttcaggagcgtctgcaagaagatacgtcttttgggggcaacctcgggcgagcagtcttccaggccaagaagcgggttctcgaacctctcggtctggttgaggaaggcgctaagacggctcctggaaagaagagaccggtagagccgtcaccacagcgttcccccgactcctccacgggcatcggcaagaaaggccagcagcccgccagaaagagactcaatttcggtcagactggcgactcagagtcagtccccgaccctcaacctatcggagaacctccagcagcgccctctagtgtgggatctggtacaatggctgcaggcggtggcgcaccaatggcagacaataacgaaggtgccgacggagtgggtagttcctcgggaaattggcattgcgattccacatggctgggcgacagagtcatcaccaccagcacccgaacctgggccctgcccacctacaacaaccacctctacaagcaaatctccaacgggacctcgggaggcagcaccaacgacaacacctactttggctacagcaccccctgggggtattttgactttaacagattccactgccacttctcaccacgtgactggcagcgactcatcaacaacaactggggattccggcccaagagactcagcttcaagctcttcaacatccaggtcaaagaggtcacgcagaatgaaggcaccaagaccatcgccaataaccttaccagcacggttcaggtcttttcggactcggaataccagctgccctacgtcctcggctccgcacaccagggctgcctgcctccgttcccggcggacgtcttcatgattccccagtacggctacctgactctgaacaatggcagccaatcggtgggtcgttcctctttctactgcctggaatatttcccttctcaaatgctgagaacgggcaacaacttcaccttcagctacaccttcgaggacgttcccttccacagcagctacgcacacagccagagcctggaccggctgatgaatcctcttatcgaccagtacctgtattacctggccagaacacagagcaacgcaggaggcacagctggcaatcgggaactgcagttttatcagggcgggcctaccaccatggccgaacaagccaaaaactggctgcctggaccttgcttccggcaacaaagagtctccaagacgctggatcaaaacaacaacagcaactttgcttggactggtgccaccaaataccatctaaatggaagaaattcattggttaatcccggtgtcgccatggcaacccacaaggacgacgaggaacgcttcttcccttcgagcggagtcctgatttttggaaaaactggagcagctaataagactacactggaaaatgtgttaatgacaaatgaagaggaaattcgtcctaccaacccggtagccaccgaggaatacgggactgttagcagcaacctgcaggcggctaacactgcagcccagacacaagttgtcaacaaccagggagccttacctggtatggtctggcagaaccgggacgtgtacctgcagggtcccatctgggccaagattcctcacacggacggcaactttcacccgtctccgctgatgggcggctttggactgaagcatccgcctcctcagatcctgatcaaaaacactcctgttcctgctaatcccccggaggtgtttacgcctgccaagtttgcttctttcatcacacagtacagcaccggccaggtcagcgtggagatcgagtgggagctgcagaaggagaacagcaagcgctggaacccagagattcagtatacctccaattttgacaaacagactggtgtggactttgccgttgacagccagggtgtttattctgagcctcgccccattggtactcgttacctcacccgtaatctgtaa

SEQ ID NO: 450 - protein, 738 aa, Adeno-associated virus
MAADGYLPDWLEDNLSEGIREWWDLKPGAPKPKANQQKQDDGRGLVLPGYKHLGPFNGLDKGEPVNAADAAALEHDKAYDQQLKAGDNPYLRYNHADAEFQERLQEDTSFGGNLGRAVFQAKKRVLEPLGLVEEGAKTAPGKKRPVEPSPQRSPDSSTGIGKKGQQPARKRLNFGQTGDSESVPDPQPIGEPPAAPSSVGSGTMAAGGGAPMADNNEGADGVGSSSGNWHCDSTWLGDRVITTSTRTWALPTYNNHLYKQISNGTSGGSTNDNTYFGYSTPWGYFDFNRFHCHFSPRDWQRLINNNWGFRPKRLSFKLFNIQVKEVTQNEGTKTIANNLTSTVQVFSDSEYQLPYVLGSAHQGCLPPFPADVFMIPQYGYLTLNNGSQSVGRSSFYCLEYFPSQMLRTGNNFTFSYTFEDVPFHSSYAHSQSLDRLMNPLIDQYLYYLARTQSNAGGTAGNRELQFYQGGPTTMAEQAKNWLPGPCFRQQRVSKTLDQNNNSNFAWTGATKYHLNGRNSLVNPGVAMATHKDDEERFFPSSGVLIFGKTGAANKTTLENVLMTNEEEIRPTNPVATEEYGTVSSNLQAANTAAQTQVVNNQGALPGMVWQNRDVYLQGPIWAKIPHTDGNFHPSPLMGGFGLKHPPPQILIKNTPVPANPPEVFTPAKFASFITQYSTGQVSVEIEWELQKENSKRWNPEIQYTSNFDKQTGVDFAVDSQGVYSEPRPIGTRYLTRNL

SEQ ID NO: 451 - protein, 737 aa, Adeno-associated virus
MAADGYLPDWLEDNLSEGIREWWDLKPGAPKPKANQQKQDDGRGLVLPGYKYLGPFNGLDKGEPVNAADAAALEHDKAYDQQLKAGDNPYLRYNHADAEFQERLQEDTSFGGNLGRAVFQAKKRVLEPLGLVEEAAKTAPGKKRPVEPSPQRSPDSSTGIGKKGQQPARKRLNFGQTGDSESVPDPQPIGEPPAGPSGLGSGTMAAGGGAPMADNNKGADGVGNASGNWHCDSTWLGDRVITTSTRTWALPTYNNHLYKQISSQSAGSTNDNVYFGYSTPWGYFDFNRFHCHFSPRDWQRLINSNWGFRPKKLNFKLFNIQVKEVTTNDGVTTIANNLTSTVQVFSDSEYQLPYVLGSAHQGCLPPFPADVFMIPQYGYLTLNNGSQSVGRSSFYCLEYFPSQMLRTGNNFTFSYTFEDVPFHSSYAHSQSLDRLMNPLIDQYLYYLARTQSNAGGTAGNRELQFYQGGPTTMAEQAKNWLPGPCFRQQRVSKTLDQNNNSNFAWTGATKYHLNGRNSLVNPGVAMATHKDDEERFFPSSGVLIFGKTGAANKTTLENVLMTNEEEIRPTNPVATEEYGTVSSNLQAANTAAQTQVVNNQGALPGMVWQNRDVYLQGPIWAKIPHTDGNFHPSPLMGGFGLKHPPPQILIKNTPVPANPPEVFTPAKFASFITQYSTGQVSVEIEWELQKENSKRWNPEIQYTSNFDKQTGVDFAVDSQGVYSEPRPIGTRYLTRNL

SEQ ID NO: 452 - protein, 737 aa, Adeno-associated virus
MAADGYLPDWLEDNLSEGIREWWDLKPGAPKPKANQQKQDDGRGLVLPGYKYLGPFNGLDKGEPVNAADAAALEHDKAYDQQLKAGDNPYLRYNHADAEFQERLQEDTSFGGNLGRAVFQAKKRVLEPLGLVEEAAKTAPGKKRPVEPSPQRSPDSSTGIGKKGQQPARKRLNFGQTGDSESVPDPQPIGEPPAGPSGLGSGTMAAGGGAPMADNNEGADGVGNASGNWHCDSTWLGDRVITTSTRTWALPTYNNHLYKQISSQSAGSTNDNVYFGYSTPWGYFDFNRFHCHFSPRDWQRLINSNWGFRPKKLNFKLFNIQVKEVTTNDGVTTIANNLTSTVQVFSDSEYQLPYVLGSAHQGCLPPFPADVFMIPQYGYLTLNNGSQSVGRSSFYCLEYFPSQMLRTGNNFTFSYTFEDVPFHSSYAHSQSLDRLMNPLIDQYLYYLARTQSNAGGTAGNRELQFYQGGPTTMAEQAKNWLPGPCFRQQRVSKTLDQNNNSNFAWTGATKYHLNGRNSLVNPGVAMATHKDDEERFFPSSGVLIFGKTGAANKTTLENVLMTNEEEIRPTNPVATEEYGTVSSNLQAANTAAQTQVVNNQGALPGMVWQNRDVYLQGPIWAKIPHTDGNFHPSPLMGGFGLKHPPPQILIKNTPVPANPPEVFTPAKFASFITQYSTGQVSVEIEWELQKENSKRWNPEIQYTSNFDKQTGVDFAVDSQGVYSEPRPIGTRYLTRNL

SEQ ID NO: 453 - protein, 737 aa, Adeno-associated virus
MAADGYLPDWLEDNLSEGIREWWDLKPGAPKPKANQQKQDDGRGLVLPGYKYLGPFNGLDKGEPVNAADAAALEHDKAYDQQLKAGDNPYLRYNHADAEFQERLQEDTSFGGNLGRAVFQAKKRVLEPLGLVEEAAKTAPGKKRPVEPSPQRSPDSSTGIGKKGQQPARKRLNFGQTGDSESVPDPQPIGEPPAGPSGLGSGTMAAGGGAPMADNNEGADGVGNASGNWHCDSTWLGDRVITTSTRTWALPTYNNHLYKQISSQSAGSTNDNVYFGYSTPWGYFDFNRFHCHFSPRDWQRLINNNWGFRPKKLNFKLFNIQVKEVTTNDGVTTIANNLTSTVQVFSDSEYQLPYVLGSAHQGCLPPFPADVFMIPQYGYLTLNNGSQSVGRSSFYCLEYFPSQMLRTGNNFTFSYTFEDVPFHSSYAHSQSLDRLMNPLIDQYLYYLARTQSNAGGTAGNRELQFYQGGPTTMAEQAKNWLPGPCFRQQRVSKTLDQNNNSNFAWTGATKYHLNGRNSLVNPGVAMATHKDDEERFFPSSGVLIFGKTGAANKTTLENVLMTNEEEIRPTNPVATEEYGTVSSNLQAANTAAQTQVVNNQGALPGMVWQNRDVYLQGPIWAKIPHTDGNFHPSPLMGGFGLKHPPPQILIKNTPVPANPPEVFTPAKFASFITQYSTGQVSVEIEWELQKENSKRWNPEIQYTSNFDKQTGVDFAVDSQGVYSEPRPIGTRYLTRNL

SEQ ID NO: 454 - protein, 737 aa, Adeno-associated virus
MAADGYLPDWLEDNLSEGIREWWDLKPGAPKPKANQQKQDDGRGLVLPGYKYLGPFNGLDKGEPVNAADAAALEHDKAYDQQLKAGDNPYLRYNHADAEFQERLQEDTSFGGNLGRAVFQAKKRVLEPLGLVEEAAKTAPGKKRPVEPSPQRSPDSSTGIGKKGQQPARKRLNFGQTGDSESVPDPQPIGEPPAGPSGLGSGTMAAGGGAPMADNNKGADGVGNASGNWHCDSTWLGDRVITTSTRTWALPTYNNHLYKQISSQSAGSTNDNVYFGYSTPWGYFDFNRFHCHFSPRDWQRLINNNWGFRPKKLNFKLFNIQVKEVTTNDGVTTIANNLTSTVQVFSDSEYQLPYVLGSAHQGCLPPFPADVFMIPQYGYLTLNNGSQSVGRSSFYCLEYFPSQMLRTGNNFTFSYTFEDVPFHSSYAHSQSLDRLMNPLIDQYLYYLARTQSNAGGTAGNRELQFYQGGPTTMAEQAKNWLPGPCFRQQRVSKTLDQNNNSNFAWTGATKYHLNGRNSLVNPGVAMATHKDDEERFFPSSGVLIFGKTGAANKTTLENVLMTNEEEIRPTNPVATEEYGTVSSNLQAANTAAQTQVVNNQGALPGMVWQNRDVYLQGPIWAKIPHTDGNFHPSPLMGGFGLKHPPPQILIKNTPVPANPPEVFTPAKFASFITQYSTGQVSVEIEWELQKENSKRWNPEIQYTSNFDKQTGVDFAVDSQGVYSEPRPIGTRYLTRNL

SEQ ID NO: 455 - DNA, 2214 bp, Adeno-associated virus
atggctgctgacggttatcttccagattggctcgaggacaacctctctgagggcattcgcgagtggtgggacctgaaacctggagcccccaagcccaaggccaaccagcagaagcaggacgacggccggggtctggtgcttcctggctacaagtacctcggacccttcaacggactcgacaagggggagcccgtcaacgcggcggacgcagcggccctcgagcacgacaaggcctacgaccagcagctcaaagcgggtgacaatccgtacctgcggtataaccacgccgacgccgagtttcaggagcgtctgcaagaagatacgtcttttgggggcaacctcgggcgagcagtcttccaggccaagaagcgggttctcgaacctctcggtctggttgaggaagctgctaagacggctcctggaaagaagagaccggtagaaccgtcacctcagcgttcccccgactcctccacgggcatcggcaagaaaggccagcagcccgctagaaagagactgaactttgggcagactggcgactcagagtcagtccccgaccctcaaccaatcggagaaccaccagcaggcccctctggtctgggatctggtacaatggctgcaggcggtggcgcaccaatggctgacaataacaagggcgccgacggagtgggtaatgcctcaggaaattggcattgcgattccacatggctgggcgacagagtcatcaccaccagcacccgaacctgggctttgcccacctacaacaaccacctctacaagcaaatctccagtcagtcagcaggtagcaccaacgacaacgtctacttcggctacagcaccccctgggggtattttgacttcaacagattccactgtcacttctcaccacgtgactggcagcggctcatcaacagcaactggggattccggcccaagaagctcaacttcaagctgttcaacatccaggtcaaggaggtcacaacgaatgacggcgtcacgaccatcgccaataaccttaccagcacggttcaggtcttttcggactcggaataccagctgccctacgtcctcggctccgcacaccagggctgcctgcctccgttcccggcggacgtcttcatgattccccagtacggctacctgactctgaacaatggcagccaatcggtgggtcgttcctctttctactgcctggaatatttcccttctcaaatgctgagaacgggcaacaacttcaccttcagctacaccttcgaggacgttcccttccacagcagctacgcacacagccagagcctggaccggctgatgaatcctcttatcgaccagtacctgtattacctggccagaacacagagcaacgcaggaggcacagctggcaatcgggaactgcagttttatcagggcgggcctaccaccatggccgaacaagccaaaaactggctgcctggaccttgcttccggcaacaaagagtctccaagacgctggatcaaaacaacaacagcaactttgcttggactggtgccaccaaataccatctaaatggaagaaattcattggttaatcccggtgtcgccatggcaacccacaaggacgacgaggaacgcttcttcccttcgagcggagtcctgatttttggaaaaactggagcagctaataagactacactggaaaatgtgttaatgacaaatgaagaggaaattcgtcctaccaacccggtagccaccgaggaatacgggactgttagcagcaacctgcaggcggctaacactgcagcccagacacaagttgtcaacaaccagggagccttacctggtatggtctggcagaaccgggacgtgtacctgcagggtcccatctgggccaagattcctcacacggacggcaactttcacccgtctccgctgatgggcggctttggactgaagcatccgcctcctcagatcctgatcaaaaacactcctgttcctgctaatcccccggaggtgtttacgcctgccaagtttgcttctttcatcacacagtacagcaccggccaggtcagcgtggagatcgagtgggagctgcagaaggagaacagcaagcgctggaacccagagattcagtatacctccaattttgacaaacagactggtgtggactttgccgttgacagccagggtgtttattctgagcctcgccccattggtactcgttacctcacccgtaatctgtaa

SEQ ID NO: 456 - DNA, 2217 bp, Adeno-associated virus
atggctgccgatggttatcttccagattggctcgaggacaacctctctgagggcattcgcgagtggtgggacctgaaacctggagccccgaaacccaaagccaaccagcaaaagcaggacgacggccggggtctggtgcttcctggctacaagtacctcggacccttcaacggactcgacaagggggagcccgtcaacgcggcggacgcagcggccctcgagcacgacaaggcctacgaccagcagctcaaagcgggtgacaatccgcacctgcggtataatcacgccgacgccgagtttcaggagcgtctgcaagaagatacgtcttttgggggcaacctcgggcgagcagtcttccaggccaagaagcgggttctcgaacctctcggtctggttgaggaaggcgctaagacggctcctggaaagaagagaccggtagagccgtcaccacagcgttcccccgactcctccacgggcatcggcaagaaaggccagcagcccgccagaaagagactcaatttcggtcagactggcgactcagagtcagtccccgaccctcaacttatcggagaacctccagcagcgccctctagtgtgggatctggtacaatggctgcaggcggtggcgcaccaatggcagacaataacgaaggtgccgacggagtgggtagttcctcgggaaattggcattgcgattccacatggctgggcgacagagtcatcaccaccagcacccgaacctgggccctgcccacctacaacaaccacctctacaagcaaatctccaacgggacctcgggaggcagcaccaacgacaacacctactttggctacagcaccccctgggggtattttgactttaacagattccactgccacttctcaccacgtgactggcagcgactcatcaacaacaactggggattccggcccaagagactcagcttcaagctcttcaacatccaggtcaaagaggtcacgcagaatgaaggcaccaagaccatcgccaataacctcaccagcaccatccaggtgtttacggactcggagtaccagctgccgtacgtcctcggctctgcccaccagggctgcctgcctccgttcccggcggacgtcttcatgattcctcagtacggcaacctgactctcaacaacggtagtcaggccgtgggacgttcctccttctactgcctggagtacttcccctctcagatgctgagaacgggcaacaacttttccttcagctacactttcgaggacgtgcctttccacagcagctacgcgcacagccagagtttggacaggctgatgaatcctctcatcgaccagtacctgtactacctgtcaagaacccagtctacgggaggcacagcgggaacccagcagttgctgttttctcaggccgggcctagcaacatgtcggctcaggccagaaactggctgcctggaccctgctacagacagcagcgcgtctccacgacactgtcgcaaaacaacaacagcaactttgcctggactggtgccaccaagtatcatctgaacggcagagactctctggtgaatccgggcgtcgccatggcaaccaacaaggacgacgaggaccgcttcttcccatccagcggcatcctcatgtttggcaagcagggagctggaaaagacaacatgggctatagcaacgtgatgctaaccagcgaggaagaaatcaagaccaccaaccccgtggccacagaacagtatggcgtggtggctgataacctacagcagcaaaacaccgctcctattgtgggggccgtcaacagccagggagccttacctggcatggtctggcagaaccgggacgtgtacctgcagggtcctatttgggccaagattcctcacacagatggcaactttcacccgtctcctttaatgggcggctttggacttaaacatccgcctcctcagatcctcatcaaaaacactcctgttcctgcggatcctccaacagcgttcaaccaggccaagctgaattctttcatcacgcagtacggcaccggacaagtcagcgtggagatcgagtgggagctgcagaaggagaacagcaagcgctggaacccagagattcagtatacttccaactactacaaatctacaaatgtggactttgctgttaatactgagggtgtttactctgagcctcgccccattggcactcgttacctcacccgtaatctgtaa

SEQ ID NO: 457 - protein, 738 aa, Adeno-associated virus
MAADGYLPDWLEDNLSEGIREWWDLKPGAPKPKANQQKQDDGRGLVLPGYKYLGPFNGLDKGEPVNAADAAALEHDKAYDQQLKAGDNPHLRYNHADAEFQERLQEDTSFGGNLGRAVFQAKKRVLEPLGLVEEGAKTAPGKKRPVEPSPQRSPDSSTGIGKKGQQPARKRLNFGQTGDSESVPDPQLIGEPPAAPSSVGSGTMAAGGGAPMADNNEGADGVGSSSGNWHCDSTWLGDRVITTSTRTWALPTYNNHLYKQISNGTSGGSTNDNTYFGYSTPWGYFDFNRFHCHFSPRDWQRLINNNWGFRPKRLSFKLFNIQVKEVTQNEGTKTIANNLTSTIQVFTDSEYQLPYVLGSAHQGCLPPFPADVFMIPQYGNLTLNNGSQAVGRSSFYCLEYFPSQMLRTGNNFSFSYTFEDVPFHSSYAHSQSLDRLMNPLIDQYLYYLSRTQSTGGTAGTQQLLFSQAGPSNMSAQARNWLPGPCYRQQRVSTTLSQNNNSNFAWTGATKYHLNGRDSLVNPGVAMATNKDDEDRFFPSSGILMFGKQGAGKDNMGYSNVMLTSEEEIKTTNPVATEQYGVVADNLQQQNTAPIVGAVNSQGALPGMVWQNRDVYLQGPIWAKIPHTDGNFHPSPLMGGFGLKHPPPQILIKNTPVPADPPTAFNQAKLNSFITQYGTGQVSVEIEWELQKENSKRWNPEIQYTSNYYKSTNVDFAVNTEGVYSEPRPIGTRYLTRNL

SEQ ID NO: 458 - DNA, 2217 bp, Adeno-associated virus
atggctgccgatggttatcttccagattggctcgaggacaacctctctgagggcattcgcgagtggtgggacctgaaacctggagccccgaaacccaaagccaaccagcaaaagcaggacgacggccggggtctggtgcttcctggctacaagtacctcggacccttcaacggactcgacaagggggagcccgtcaacgcggcggacgcagcggccctcgagcacgacaaggcctacgaccagcagctcaaagcgggtgacaatccgtacctgcggtataatcacgccgacgccgagtttcaggagcgtctgcaagaagatacgtcttttgggggcaacctcgggcgagcagtcttccaggccaagaagcgggttctcgaacctctcggtctggttgaggaaggcgctaagacggctcctggaaagaagagaccggtagagccgtcaccacagcgttcccccgactcctccacgggcatcggcaagaaaggccagcagcccgccggaaagagactcaatttcggtcagactggcgactcagagtcagtccccgaccctcaacctatcggagaacctccagcagcgccctctagtgtgggatctggtacaatggctgcaggcggtggcgcaccaatggcagacaataacgaaggtgccgacggagtgggtagttcctcgggaaattggcattgcgattccacatggctgggcgacagagtcatcaccaccagcacccgaacctgggccctgcccacctacaacaaccacctctacaagcaaatctccaacgggacctcgggaggcagcaccaacgacaacacctactttggctacagcaccccctgggggtattttgactttaacagattccactgccacttctcaccacgtgactggcagcgactcatcaacaacaactggggattccggcccaagagactcagcttcaagctcttcaacatccaggtcaaagaggtcacgcagaatgaaggcaccaagaccatcgccaataacctcaccagcaccatccaggtgtttacggactcggaataccagctgccgtacgtcctcggctctgcccaccagggctgcctgcctccgttcccggcggacgtcttcatgattcctcagtacggctacctgactctcaacaacggtagtcaggccgtgggacgttcctccttctactgcctggagtacttcccctctcagatgctgagaacgggcaacaacttttccttcagctacactttcgaggacgtgcctttccacagcagctacgcgcacagccagagtttggacaggctgatgaatcctctcgtcgaccagtacctgtactacctgtcaagaacccagtctacgggaggcacagcgggaacccagcagttgctgttttctcaggccgggcctagcaacatgtcggctcaggccagaaactggctgcctggaccctgctacagacagcagcgcgtctccacgacactgtcgcaaaacaacaacagcaactttgcctggactggtgccaccaagtatcatctgaacggcagagactctctggtgaatccgggcgtcgccatggcaaccaacaaggacgacgaggaccgcttcttcccatccagcggcatcctcatgtttggcaagcagggagctggaaaagacaacgtggactatagcaacgtgatgctaaccagcgaggaagaaatcaagaccaccaaccccgtggccacagaacagtatggcgtggtggctgataacctacagcagcaaaacaccgctcctattgtgggggccgtcaacagccagggagccttacctggcatggtctggcagaaccgggacgtgtacctgcagggtcctatttgggccaagattcctcacacagatggcaactttcacccgtctcctttaatgggcggctttggacttaaacatccgcctcctcagatcctcatcaaaaacactcctgttcctgcggatcctccaacagcgttcaaccaggccaagctgaattctttcatcacgcagtacagcaccggacaagtcagcgtggagatcgagtgggagctgcagaaggagaacagcaagcgctggagcccagagattcagtatacttccaactactacaaatctacaaatgtggactttgctgttaatactgagggtgtttactctgagcctcgccccattggcactcgttacctcacccgtaatctgtaa

SEQ ID NO: 459 - protein, 738 aa, Adeno-associated virus
MAADGYLPDWLEDNLSEGIREWWDLKPGAPKPKANQQKQDDGRGLVLPGYKYLGPFNGLDKGEPVNAADAAALEHDKAYDQQLKAGDNPYLRYNHADAEFQERLQEDTSFGGNLGRAVFQAKKRVLEPLGLVEEGAKTAPGKKRPVEPSPQRSPDSSTGIGKKGQQPAGKRLNFGQTGDSESVPDPQPIGEPPAAPSSVGSGTMAAGGGAPMADNNEGADGVGSSSGNWHCDSTWLGDRVITTSTRTWALPTYNNHLYKQISNGTSGGSTNDNTYFGYSTPWGYFDFNRFHCHFSPRDWQRLINNNWGFRPKRLSFKLFNIQVKEVTQNEGTKTIANNLTSTIQVFTDSEYQLPYVLGSAHQGCLPPFPADVFMIPQYGYLTLNNGSQAVGRSSFYCLEYFPSQMLRTGNNFSFSYTFEDVPFHSSYAHSQSLDRLMNPLVDQYLYYLSRTQSTGGTAGTQQLLFSQAGPSNMSAQARNWLPGPCYRQQRVSTTLSQNNNSNFAWTGATKYHLNGRDSLVNPGVAMATNKDDEDRFFPSSGILMFGKQGAGKDNVDYSNVMLTSEEEIKTTNPVATEQYGVVADNLQQQNTAPIVGAVNSQGALPGMVWQNRDVYLQGPIWAKIPHTDGNFHPSPLMGGFGLKHPPPQILIKNTPVPADPPTAFNQAKLNSFITQYSTGQVSVEIEWELQKENSKRWSPEIQYTSNYYKSTNVDFAVNTEGVYSEPRPIGTRYLTRNL

SEQ ID NO: 460 - DNA, 2217 bp, Adeno-associated virus
atggttgccgatggttatcttccagattggctcgaggacaacctctctgagggcattcgcgagtggtgggacctgaaacctggagccccgaaacccaaagccaaccagcaaaagcagggcgacggccggggtctggtgcttcctggctacaagtacctcggacccttcaacggactcgacaagggggagcccgtcaacgcggcggacgcagcggccctcgagcacgacaaggcctacgaccagcagcttaaagcgggtgacaatccgtacctgcggtataatcacgccgacgccgagcttcaggagcgtctgcaagaagatacgtcttttgggggcaacctcgggcgagcagtcttccaggccaagaagcgggttctcgaacctctcggtctggttgaggaaggcgctaagacggctcctggaaagaagagaccggtagagccgtcaccacagcgttcccccgactcctccacgggcatcggcaagaaaggccagcagcccgccagaaagagactcaatttcggtcagactggcgactcagagtcagtccccgaccctcaacctatcggagaacctccagcagcgccctctagtgtgggatctggtacaatggctgcaggcggtggcgcgccaatggcagacaataacgaaggtgccgacggagtgggtagttcctcgggaaattggcattgcgattccacatggctgggcgacagagtcatcaccaccagcacccgaacctgggccctgcccacctacaacaaccacctctacaagcaaatctccaacgggacctcgggaggcagcaccaacgacaacacctactttggctacagcaccccctgggggtattttgactttaacagattccactgccacttctcaccacgtgactggcagcgactcatcaacaacaactggggattccggcccaagagactcagcttcaagctcttcaacatccaggtcaaagaggtcacgcagaatgaaggcaccaagaccatcgccaataacctcaccagcaccatccaggtgtttacggactcggaataccagctgccgtacgtcctcggctctgcccaccagggctgccagcctccgttcccggcggacgtcttcatgattcctcagtacggctacctgactctcaacaacggtagtcaggccgtgggacgttcctccttctactgcctggagtacttcccctctcagatgctgagaacgggcaacaacttttccttcagctacactttcgaggacgtgcctttccacagcagctacgcgcacagccagagtttggacaggctgatgaatcctctcatcgaccagtacctgtactacctgtcaagaacccagtctacgggaggcacagcgggaacccagcagttgctgttttctcaggccgggcctagcaacatgtcggctcaggccagaaactggctgcctggaccctgctacagacagcagcgcgtctccacgacactgtcgcaaaacaacaacagcaactttgcctggactggtgccaccaagtatcatctgaacggcagagactctctggtgaatccgggcgtcgccatggcaaccaacaaggacgacgaggaccgcttcttcccatccagcggcatcctcatgtttggcaagcagggagctggaaaagacaacgtggactatagcaacgtgatgctaaccagcgaggaagaaatcaagaccaccaaccccgtggccacagaacagtatggcgtggtggctgataacctacagcagcaaaacaccgctcctattgtgggggccgtcaacagccagggagccttacctggcatggtctggcagaaccgggacgtgtacctgcagggtcctatttgggccaagattcctcacacagatggcaactttcacccgtctcctttaatgggcggctttggacttaaacatccgcctcctcagatcctcatcaaaaacactcctgttcctgcggatcctccaacagcgttcaaccaggccaagctgaattctttcatcacgcagtacagcaccggacaagtcagcgtggagatcgagtgggagccgcagaaggagaacagcaagcgctggaacccagagattcagtatacttccaactactacaaatctacaaatgtggactttgctgttaatactgagggtgtttactctgagcctcgccccattggcactcgttacctcacccgtaatctgtaa

SEQ ID NO: 461 - protein, 738 aa, Adeno-associated virus
MVADGYLPDWLEDNLSEGIREWWDLKPGAPKPKANQQKQGDGRGLVLPGYKYLGPFNGLDKGEPVNAADAAALEHDKAYDQQLKAGDNPYLRYNHADAELQERLQEDTSFGGNLGRAVFQAKKRVLEPLGLVEEGAKTAPGKKRPVEPSPQRSPDSSTGIGKKGQQPARKRLNFGQTGDSESVPDPQPIGEPPAAPSSVGSGTMAAGGGAPMADNNEGADGVGSSSGNWHCDSTWLGDRVITTSTRTWALPTYNNHLYKQISNGTSGGSTNDNTYFGYSTPWGYFDFNRFHCHFSPRDWQRLINNNWGFRPKRLSFKLFNIQVKEVTQNEGTKTIANNLTSTIQVFTDSEYQLPYVLGSAHQGCQPPFPADVFMIPQYGYLTLNNGSQAVGRSSFYCLEYFPSQMLRTGNNFSFSYTFEDVPFHSSYAHSQSLDRLMNPLIDQYLYYLSRTQSTGGTAGTQQLLFSQAGPSNMSAQARNWLPGPCYRQQRVSTTLSQNNNSNFAWTGATKYHLNGRDSLVNPGVAMATNKDDEDRFFPSSGILMFGKQGAGKDNVDYSNVMLTSEEEIKTTNPVATEQYGVVADNLQQQNTAPIVGAVNSQGALPGMVWQNRDVYLQGPIWAKIPHTDGNFHPSPLMGGFGLKHPPPQILIKNTPVPADPPTAFNQAKLNSFITQYSTGQVSVEIEWEPQKENSKRWNPEIQYTSNYYKSTNVDFAVNTEGVYSEPRPIGTRYLTRNL

SEQ ID NO: 462 - DNA, 2217 bp, Adeno-associated virus
atggctgccgatggttatcttccagattggctcgaggacaacctctctgagggcattcgcgagtggtgggacctgaaacctggagccccgaaacccaaagccaaccagcaaaagcaggacgacggccggggtctggtgcttcctggctacaagtacctcggacccttcaacggactcgacaagggggagcccgtcaacgcggcggacgcagcggccctcgagcacgacaaggcctacgaccagcagctcaaagcgggtgacaatccgtacctgcggtataatcacgccgacgccgagtttcaggagcgtctgcaagaagatacgtcttttgggggcaacctcgggcgagcagtcttccaggccaagaagcgggttctcgaacctctcggtctggttgaggaaggcgctaagacggctcctggaaagaagagaccggtagagccgtcaccacagcgttcccccgactcctccacgggcatcggcaagaaaggccagcagcccgccagaaagagactcaatttcggtcagactggcgactcagagtcagtccccgaccctcaacctatcggagaacctccagcagcgccctctagtgtgggatctggtacaatggctgcaggcggtggcgcaccaatggcagacaataacgaaggtgccgacggagtgggtagttcctcgggaaattggcattgcgattccacatggctgggcgacagagtcatcaccaccagcacccgaacctgggccctgcccacctacaacaaccacctctacaagcaaatctccaacgggacctcgggaggcagcaccaacgacaacacctactttggctacagcaccccctgggggtattttgactttaacagattccactgccacttctcaccacgtgactggcagcgactcatcaacaacaactggggattccggcccaagagactcagcttcaagctcttcaacatccaggtcaaagaggtcacgcagaatgaaggcaccaagaccatcgccaatagcctcaccagcaccatccaggtgtttacggactcggaataccagctgccgtacgtcctcggctctgcccaccagggctgcctgcctccgttcccggcggacgtcttcatgattcctcagtacggctacctgactcccaacaacggtagtcaggccgtgggacgttcctccttctactgcctggagtacttcccctctcagatgctgagaacgggcaacaacttttccttcagctacactttcgaggacgtgcctttccacagcagctacgcgcacagccagagtttggacaggctgatgaatcctctcatcgaccagtacctgtactacctgtcaagaacccagtctacgggaggcacagcgggaacccagcagttgctgtcttctcaggccgggcctagcaacatgtcggctcaggccagaaactggctgcctggaccctgctacagacagcagcgcgtctccacgacactgtcgcaaaacaacaacagcaactttgcctggactggtgccaccaagtatcatctgaacggcagagactctctggtgaatccgggcgtcgccatggcaaccaacaaggacgacgaggaccgcttcttcccatccagcggcatcctcatgtttggcaagcagggagctggaaaagacaacgtggactatagcaacgtgatgctaaccagcgaggaagaaatcaagaccaccaaccccgtggccacagaacagtatggcgtggtggctgataacctacagcagcaaaacaccgctcctattgtgggggccgtcaacagccagggagccttacctggcatggtctggcagaaccgggacgtgtacttgcagggtcctatttgggccaagattcctcacacagatggcaactttcacccgtctcctttaatgggcggctttggacttaaacatccgcctcctcagatcctcatcaaaaacactcctgttcctgcggatcctccaacagcgttcaaccaggccaagctgaattctttcatcacgcagtacagcaccggacaagtcagcgtggagatcgagtgggagctgcagaaggagaacagcaagcgctggaacccagagattcagtatacttccaactactacaaatctacaaatgtggactttgctgttaatactgagggtgtttactctgagcctcgccccattggcactcgttacctcacccgtaatctgtaa

SEQ ID NO: 463 - protein, 738 aa, Adeno-associated virus
MAADGYLPDWLEDNLSEGIREWWDLKPGAPKPKANQQKQDDGRGLVLPGYKYLGPFNGLDKGEPVNAADAAALEHDKAYDQQLKAGDNPYLRYNHADAEFQERLQEDTSFGGNLGRAVFQAKKRVLEPLGLVEEGAKTAPGKKRPVEPSPQRSPDSSTGIGKKGQQPARKRLNFGQTGDSESVPDPQPIGEPPAAPSSVGSGTMAAGGGAPMADNNEGADGVGSSSGNWHCDSTWLGDRVITTSTRTWALPTYNNHLYKQISNGTSGGSTNDNTYFGYSTPWGYFDFNRFHCHFSPRDWQRLINNNWGFRPKRLSFKLFNIQVKEVTQNEGTKTIANSLTSTIQVFTDSEYQLPYVLGSAHQGCLPPFPADVFMIPQYGYLTPNNGSQAVGRSSFYCLEYFPSQMLRTGNNFSFSYTFEDVPFHSSYAHSQSLDRLMNPLIDQYLYYLSRTQSTGGTAGTQQLLSSQAGPSNMSAQARNWLPGPCYRQQRVSTTLSQNNNSNFAWTGATKYHLNGRDSLVNPGVAMATNKDDEDRFFPSSGILMFGKQGAGKDNVDYSNVMLTSEEEIKTTNPVATEQYGVVADNLQQQNTAPIVGAVNSQGALPGMVWQNRDVYLQGPIWAKIPHTDGNFHPSPLMGGFGLKHPPPQILIKNTPVPADPPTAFNQAKLNSFITQYSTGQVSVEIEWELQKENSKRWNPEIQYTSNYYKSTNVDFAVNTEGVYSEPRPIGTRYLTRNL

SEQ ID NO: 464 - protein, 738 aa, Adeno-associated virus
MAADGYLPDWLEDNLSEGIREWWDLKPGAPKPKANQQKQDDGRGLVLPGYKYLGPFNGLDKGEPVNAADAAALEHDKAYDQQLKAGDNPYLRYNHADAEFQERLQEDTSFGGNLGRAVFQAKKRVLEPLGLVEEGAKTAPGKKRPVEPSPQRSPDSSTGIGKKGQQPARKRLNFGQTGDSESVPDPQPIGEPPAAPSSVGSGTMAAGGGAPMADNNEGADGVGSSSGNWHCDSTWLGDRVITTSTRTWALPTYNNHLYKQISNGTSGGSTNDNTYFGYSTPWGYFDFNRFHCHFSPRDWQRLINNNWGFRPKRLSFKLFNIQVKEVTQNEGTKTIANNLTSTIQVFTDSEYQLPYVLGSAHQGCLPPFPADVFMIPQYGYLTLNNGSQAVGRSSFYCLEYFPSQMLRTGNNFSFSYTFEDVPFHSSYVHSQSLDRLMNPLIDQYLYYLSRTQSTGGTAGTQQLLFSQAGPSNMSAQARNWLPGPCYRQQRVSTTLSQNNNSNFAWTGATKYHLNGRDSLVNSGVAMATNKDDEDRFFPSSGILMFGKQGAGKDNVDYSNVMLTSEEEIKTTNPVATEQYGVVADNLQQQNTAPIVGAVNSQGALPGMVWQNRDVYLQGPIWAKIPHTDGNFHPSPLMGGFGLKHPPPQILIKNTPVPADPPTAFNQAKLNSFITQYSTGQVSVEIEWELQKENSKRWNPEIQYTSNYYKSTNVDFAVNTEGVYSEPRPIGTRYPTRNL

SEQ ID NO: 465 - DNA, 2217 bp, Adeno-associated virus
atggctgccgatggttatcttccagattggctcgaggacaacctctctgagggcattcgcgagtggtgggacctgaaacctggagccccgaaacccaaagccaaccagcaaaagcaggacgacggccggggtctggtgcttcctggctacaagtacctcggacccttcaacggactcgacaagggggagcccgtcaacgcggcggacgcagcggccctcgagcacgacaaggcctacgaccagcagctcaaagcgggtgacaatccgtacctgcggtataatcacgccgacgccgagtttcaggagcgtctgcaagaagatacgtcttttgggggcaacctcgggcgagcagtcttccaggccaagaagcgggttctcgaacctctcggtctggttgaggaaggcgctaagacggctcctggaaagaagagaccggtagagccgtcaccacagcgttcccccgactcctccacgggcatcggcaagaaaggccagcagcccgccagaaagagactcaatttcggtcagactggcgactcagagtcagtccccgaccctcaacctatcggagaacctccagcagcgccctctagtgtgggatctggtacaatggctgcaggcggtggcgcaccaatggcagacaataacgaaggtgccgacggagtgggtagttcctcgggaaattggcattgcgattccacatggctgggcgacagagtcatcaccaccagcacccgaacctgggccctgcccacctacaacaaccacctctacaagcaaatctccaacgggacctcgggaggcagcaccaacgacaacacctactttggctacagcaccccctgggggtattttgactttaacagattccactgccacttctcaccacgtgactggcagcgactcatcaacaacaactggggattccggcccaagagactcagcttcaagctcttcaacatccaggtcaaagaggtcacgcagaatgaaggcaccaagaccatcgccaataacctcaccagcaccatccaggtgtttacggactcggaataccagctgccgtacgtcctcggctctgcccaccagggctgcctgcctccgttcccggcggacgtcttcatgattcctcagtacggctacctgactctcaacaacggtagtcaggccgtgggacgttcctccttctactgcctggagtacttcccctctcagatgctgagaacgggcaacaacttttccttcagctacactttcgaggacgtgcctttccacagcagctacgtgcacagccagagtttggacaggctgatgaatcctctcatcgaccagtacctgtactacctgtcaagaacccagtctacgggaggcacagcgggaacccagcagttgctgttttctcaggccgggcctagcaacatgtcggctcaggccagaaactggctgcctggaccctgctacagacagcagcgcgtctccacgacactgtcgcaaaacaacaacagcaactttgcctggactggtgccaccaagtatcatctgaacggcagagactctctggtgaattcgggcgtcgccatggcaaccaacaaggacgacgaggaccgcttcttcccatccagcggcatcctcatgtttggcaagcagggagctggaaaagacaacgtggactatagcaacgtgatgctaaccagcgaggaagaaatcaagaccaccaaccccgtggccacagaacagtatggcgtggtggctgataacctacagcagcaaaacaccgctcctattgtgggggccgtcaacagccagggagccttacctggcatggtctggcagaaccgggacgtgtacctgcagggtcctatttgggccaagattcctcacacagatggcaactttcacccgtctcctttaatgggcggctttggacttaaacatccgcctcctcagatcctcatcaaaaacactcctgttcctgcggatcctccaacagcgttcaaccaggccaagctgaattctttcatcacgcagtacagcaccggacaagtcagcgtggagatcgagtgggagctgcagaaggagaacagcaagcgctggaacccagagattcagtatacttccaactactacaaatctacaaatgtggactttgctgttaatactgagggtgtttactctgagcctcgccccattggcactcgttaccccacccgtaatctgtaa

SEQ ID NO: 466 - protein, 734 aa, Adeno-associated virus; identical to SEQ ID NO: 291

SEQ ID NO: 467 - DNA, 2214 bp, Adeno-associated virus
atggctgctgacggttatcttccagattggctcgaggacaacctctctgagggcattcgcgagtggtgggacctgaaacctggagccccgaaacccaaagccaaccagcagaagcaggacgacggccggggtctggtgcttcctggctacaagtacctcggacccttcaacggactcgacaagggggagcccgtcaacgcggcggacgcagcggccctcgagcacgacaaggcctacgaccagcagctcaaagcgggtgacaatccgtacctgcggtataaccacgccgacgccgagtttcaggagcgtctgcaagaagatacgtcttttgggggcaacctcgggcgagcagtcttccaggccaagaagcgggttctcgaacctctcggtctggttgaggaagctgctaagacggctcctggaaagaagagaccggtagaaccgtcacctcagcgttcccccgactcctccacgggcatcggcaagaaaggccagcagcccgctagaaagagactgaactttgggcagactggcgactcagagtcagtccccgaccctcaacctctcggagaaccaccagcaggcccctctggtctgggatctggtacaatggctgcaggcggtggcgctccaatggcagacaataacgaaggcgccgacggagtgggtaatgcctcaggaaattggcattgcgattccacatggctgggcgacagagtcatcaccaccagcacccgaacctgggctttgcccacctacaacaaccacctctacaagcaaatctccagtcagtcagcaggtagcaccaacgacaacgtctacttcggctacagcaccccctgggggtattttgacttcaacagattccactgtcacttctcaccacgtgactggcagcgactcatcaacaacaactggggattccggcccaagaagctcaacttcaagctcttcaacatccaagtcaaggaggtcacgacgaatgacggcgtcacgaccatcgctaataaccttaccagcacggttcaggtcttttcggactcggagtaccagctgccgtacgtcctcggctctgcccaccagggctgcctgcctccgttcccggcggacgtcttcatgattcctcagtacggctacctgactctgaacaatggcagccaatcggtgggacgttcatccttctactgcctggaatacttcccttctcaggtgctgagaacgggtaacaacttcaccttcagttacaccttcgaggacgtgcctttccacagcagctacgcgcacagccagagcctagaccggctgatgaatcccctcatcgaccagtacctgtattacctggctagaacacagagtaacccaggaggcacatctggcaatcgggaactgcagttttaccagggcgggccttccaccatggccgaacaagccaagaactggttacctggaccttgcttccggcaacaaagagtttccaaaacactggatcaaaacaacaacagcaactttgcttggactggtgccaccaaatatcacctgaacggcagaaactcattggtgaatcctggtgtcgccatggcaactcacaaggacgacgaggaccgctttttcccatccagcggagtcctgatttttggaaaaactggagcaaccaacaagactacattggaaaacgtgttaatgacaaatgaagaagaaattcgtcctactaatcctgtggccacagaagaatacgggatagtcagcagcaatttacaagcggccaatactgcagcccagacacaagttgtcaacaaccagggagccttacctggcatggtctggcagaaccgggacgtgtacctgcagggtcccatctgggccaaaattcctcacacagacggcaactttcacccgtctccgctgatgggcggctttggactgaagcatccgcctcctcagatcctgatcaaaaacactcctgttcctgctaatcccccggaggtgtttacgcctgccaagtttgcttctttcatcacacagtacagcaccggccaggtcagcgtggagatcgagtgggagctgcagaaggagaacagcaagcgctggaacccagagattcagtatacctccaattttgacaaacagactggtgtggactttgccgttgacagccagggtgtttattctgagcctcgccccattggtactcgttacctcacccgtaatctgtaa

SEQ ID NO: 468 - protein, 737 aa, Adeno-associated virus
MAADGYLPDWLEDNLSEGIREWWDLKPGAPKPKANQQKQDDGRGLVLPGYKYLGPFNGLDKGEPVNAADAAALEHDKAYDQQLKAGDNPYLRYNHADAEFQERLQEDTSFGGNLGRAVFQAKKRVLEPLGLVEEAAKTAPGKKRPVEPSPQRSPDSSTGIGKKGQQPARKRLNFGQTGDSESVPDPQPLGEPPAGPSGLGSGTMAAGGGAPMADNNEGADGVGNASGNWHCDSTWLGDRVITTSTRTWALPTYNNHLYKQISSQSAGSTNDNVYFGYSTPWGYFDFNRFHCHFSPRDWQRLINNNWGFRPKKLNFKLFNIQVKEVTTNDGVTTIANNLTSTVQVFSDSEYQLPYVLGSAHQGCLPPFPADVFMIPQYGYLTLNNGSQSVGRSSFYCLEYFPSQVLRTGNNFTFSYTFEDVPFHSSYAHSQSLDRLMNPLIDQYLYYLARTQSNPGGTSGNRELQFYQGGPSTMAEQAKNWLPGPCFRQQRVSKTLDQNNNSNFAWTGATKYHLNGRNSLVNPGVAMATHKDDEDRFFPSSGVLIFGKTGATNKTTLENVLMTNEEEIRPTNPVATEEYGIVSSNLQAANTAAQTQVVNNQGALPGMVWQNRDVYLQGPIWAKIPHTDGNFHPSPLMGGFGLKHPPPQILIKNTPVPANPPEVFTPAKFASFITQYSTGQVSVEIEWELQKENSKRWNPEIQYTSNFDKQTGVDFAVDSQGVYSEPRPIGTRYLTRNL

SEQ ID NO: 469 - DNA, 2214 bp, Adeno-associated virus
atggctgccgatggttatcttccagattggctcgaggacaacctctctgagggcattcgcgagtggtgggacctgaaacctggagccccgaaacccaaagccaaccagcaaaagcaggacgacggccggggtctggtgcttcctggctacaagtacctcggacccttcaacggactcgacaagggggagcccgtcaacgcggcggacgcagcggccctcgagcacgacaaggcctacgaccagcagctcaaagcgggtgacaatccgtacctgcggtataatcacgccgacgccgagtttcaggagcgtctgcaagaagatacgtcttttgggggcaacctcgggcgagcagtcttccaggccaagaagcgggttctcgaacctctcggtctggttgaggaaggcgctaagacggctcctggaaagaagagaccggtagagccgtcaccacagcgttcccccgactcctccacgggcatcggcaagaaaggccagcagcccgccagaaagagactcaatttcggtcagactggcgactcagagtcagtccccgaccctcaacctatcggagaacctccagcagcgccctctagtgtgggatctggtacaatggctgcaggcggtggcgcaccaatggcagacaataacgaaggtgccgacggagtgggtagttcctcgggaaattggcattgcgattccacacggctgggcgacagagtcatcaccaccagcacccggacctgggctttgcccacctacaacaaccacctctacaagcaaatctccagtcagtcagcaggtagcaccaacgacaacgtctacttcggctacagcaccccctgggggtattttgacttcaacagattccactgtcacttctcaccacgtgactggcagcggctcatcaacaacaactggggattccggcccaagaagctcaacttcaagctgttcaacatccaggtcaaggaggtcacaacgaatgacggcgtcacgaccatcgccaataaccttaccagcacggttcaggtcttttcggactcggaataccagctgccctacgtcctcggctccgcacaccagggctgcctgcctccgttcccggcggacgtcttcatgattccccagtacggctacctgactctgaacaatggcagccaatcggtgggtcgttcctctttctactgcctggaatatttcccttctcaaatgctgagaacgggcaacaacttcaccttcagctacaccttcgaggacgttcccttccacagcagctacgcacacagccagagcctggaccggctgatgaatcctcttatcgaccagtacctgtattacctggccagaacacagagcaacgcaggaggcacagctggcaatcgggaactgcagttttatcagggcgggcctaccaccatggccgaacaagccaaaaactggctgcctggaccttgcttccggcaacgaagagtctccaagacgctggatcaaaacaacaacagcaactttgcttggactggtgccaccaaataccatctaaatggaagaaattcattggttaatcccggtgtcgccatggcaacccacaaggacgacgaggaacgcttcttcccttcgagcggagtcctgatttttggaaaaactggagcagctaataagactacactggaaaatgtgttaatgacaaatgaagaggaaattcgtcctaccaacccggtagccaccgaggaatacgggactgttagcagcaacctgcaggcggctaacactgcagcccagacacaagttgtcaacaaccagggagccttacctggtatggtctggcagaaccgggacgtgtacctgcagggtcccatctgggccaagattcctcacacggacggcaactttcacccgtctccgctgatgggcggctttggactgaagcatccgcctcctcagatcctgatcaaaaacactcctgttcctgctaatcccccggaggtgtttacgcctgccaagtttgcttctttcatcacacagtacagcaccggccaggtcagcgtggagatcgagtgggagctgcagaaggagaacagcaagcgctggaacccagagattcagtatacctccaattttgacaaacagactggtgtggactttgccgttgacagccagggtgtttattctgagcctcgccccattggtactcgttacctcacccgtaatctgtaa

SEQ ID NO: 470 - protein, 737 aa, Adeno-associated virus
MAADGYLPDWLEDNLSEGIREWWDLKPGAPKPKANQQKQDDGRGLVLPGYKYLGPFNGLDKGEPVNAADAAALEHDKAYDQQLKAGDNPYLRYNHADAEFQERLQEDTSFGGNLGRAVFQAKKRVLEPLGLVEEGAKTAPGKKRPVEPSPQRSPDSSTGIGKKGQQPARKRLNFGQTGDSESVPDPQPIGEPPAAPSSVGSGTMAAGGGAPMADNNEGADGVGSSSGNWHCDSTRLGDRVITTSTRTWALPTYNNHLYKQISSQSAGSTNDNVYFGYSTPWGYFDFNRFHCHFSPRDWQRLINNNWGFRPKKLNFKLFNIQVKEVTTNDGVTTIANNLTSTVQVFSDSEYQLPYVLGSAHQGCLPPFPADVFMIPQYGYLTLNNGSQSVGRSSFYCLEYFPSQMLRTGNNFTFSYTFEDVPFHSSYAHSQSLDRLMNPLIDQYLYYLARTQSNAGGTAGNRELQFYQGGPTTMAEQAKNWLPGPCFRQRRVSKTLDQNNNSNFAWTGATKYHLNGRNSLVNPGVAMATHKDDEERFFPSSGVLIFGKTGAANKTTLENVLMTNEEEIRPTNPVATEEYGTVSSNLQAANTAAQTQVVNNQGALPGMVWQNRDVYLQGPIWAKIPHTDGNFHPSPLMGGFGLKHPPPQILIKNTPVPANPPEVFTPAKFASFITQYSTGQVSVEIEWELQKENSKRWNPEIQYTSNFDKQTGVDFAVDSQGVYSEPRPIGTRYLTRNL

SEQ ID NO: 471 - DNA, 2208 bp, Adeno-associated virus
atggctgccgatggttatcttccagattggctcgaggacactctctctgaaggaataagacagtggtggaagctcaaacctggcccaccaccaccaaagcccgcagagcggcataaggacgacagcaggggtcttgtgcttcctgggtacaagtacctcggacccttcaacggactcgacaagggggagccggtcaacgaggcagacgccgcggccctcgagcacgacaaggcctacgaccggcagctcgacagcggagacaacccgtacctcaagtacaaccacgccgacgcggagtttcaggagcgtcttaaagaagatacgtcttttgggggcaacctcggacgagcagtcttccaggcgaaaaagagggttcttgaacctctgggcctggttgaggaacctgttaagacggctccgggaaaaaagaggccggtagagcactctcctgcggagccagactcctcctcgggaaccggaaaagcgggccagcagcctgcaagaaaaagattgaattttggtcagactggagacgcagactccgtacctgacccccagcctctcggacagccaccagcagccccctctggtttgggatctactacaatggctacaggcagtggcgcaccaatggcagacaataacgagggtgccgatggagtgggtaattcttcaggaaattggcattgcgattcccaatggctgggcgacagagtcatcaccaccagcacccgaacctgggcccagcccacctacaacaaccacctctacaagcaaatctcaagccaatcaggagcctcaaacgacaaccactactttggctacagcaccccttgggggtattttgacttcaacagattccactgccacttttcaccacgtgactggcaaagactcatcaacaacaactggggattccgacccaagagactcaacttcaagctctttaacattcaagtcaaagaggtcacgcagaatgacggtacgacgacgattgccaataaccttaccagcacggttcaggtgtttactgactcggagtaccagctcccgtacgtcctcgggtcggcgcatcaaggatgcctcccgccgtttccagcggacgtcttcatggtcccacagtatggatacctcaccctgaacaacgggagtcaggcggtaggacgctcttccttttactgcctggagtactttccttctcagatgcttcgtactggaaacaactttcagttcagctacacctttgaagacgttcctttccacagcagctacgctcacagccagagtctggatcggctgatgaatcctctgatcgaccagtacctgtattatctgaacaaaacacaatcaaatagtggagctcttcagcagtctcggctactgtttagtcaagctggacccaccagcatgtctcttcaagctaaaaactggctacctggaccttgctacagacagcagcgtctgtcaaagcaggcaaacgacaacaacaacagcaactttccctggactgcggctacaaagtaccacctaaatggccgggactcgttggttaatccaggaccagctatggccagtcacaaagacgatgaagaaaagtttttccccatgcatggaaccctgatatttggtaaacaaggaacaaatgctaacgacgcggatttggacaatgtcatgattacagatgaagaagaaatccgcaccaccaatcccgtggctacggagcagtacggatatgtgtcaaataatttgcaaaactcaaatactggtccaactactggaactgtcaatcaccgaggagcgttacctggcatggtgtggcaggatcgagacgtgtacctgcagggacccatttgggccaagattcctcacaccgatggacactttcatccttctccactgatgggaggttttgggctcaaacacccgcctcctcagatcatgatcaaaaacactcccgttccagccaatcctcccacaaacttcagttctgccaagtttgcttctttcatcacacagtattccacggggcaggtcagcgtggagatcgagtgggagctgcagaaagagaacagcaaacgctggaatcccgaaattcagtacacttccaactacaacaaatctgttaatgtggactttactgtggacactaatggcgtgtattcagagcctcgccccattggcaccagatacctgactcgtaatctgtaa

SEQ ID NO: 472 - protein, 735 aa, Adeno-associated virus
MAADGYLPDWLEDTLSEGIRQWWKLKPGPPPPKPAERHKDDSRGLVLPGYKYLGPFNGLDKGEPVNEADAAALEHDKAYDRQLDSGDNPYLKYNHADAEFQERLKEDTSFGGNLGRAVFQAKKRVLEPLGLVEEPVKTAPGKKRPVEHSPAEPDSSSGTGKAGQQPARKRLNFGQTGDADSVPDPQPLGQPPAAPSGLGSTTMATGSGAPMADNNEGADGVGNSSGNWHCDSQWLGDRVITTSTRTWAQPTYNNHLYKQISSQSGASNDNHYFGYSTPWGYFDFNRFHCHFSPRDWQRLINNNWGFRPKRLNFKLFNIQVKEVTQNDGTTTIANNLTSTVQVFTDSEYQLPYVLGSAHQGCLPPFPADVFMVPQYGYLTLNNGSQAVGRSSFYCLEYFPSQMLRTGNNFQFSYTFEDVPFHSSYAHSQSLDRLMNPLIDQYLYYLNKTQSNSGALQQSRLLFSQAGPTSMSLQAKNWLPGPCYRQQRLSKQANDNNNSNFPWTAATKYHLNGRDSLVNPGPAMASHKDDEEKFFPMHGTLIFGKQGTNANDADLDNVMITDEEEIRTTNPVATEQYGYVSNNLQNSNTGPTTGTVNHRGALPGMVWQDRDVYLQGPIWAKIPHTDGHFHPSPLMGGFGLKHPPPQIMIKNTPVPANPPTNFSSAKFASFITQYSTGQVSVEIEWELQKENSKRWNPEIQYTSNYNKSVNVDFTVDTNGVYSEPRPIGTRYLTRNL

SEQ ID NO: 473 - DNA, 2217 bp, Adeno-associated virus
atggctgccgatggttatcttccagattggctcgaggacaacctctctgagggcattcgcgagtggtgggcgctgaaacctggagccccgaagcccaaagccaaccagcaaaagcaggacgacggccggggtctggtgcttcctggctacaagtacctcggacccttcaacggactcgacaagggggagcccgtcaacgcggcggacgcagcggccctcgagcacgacaaggcctacgaccagcagctgcaggcgggtgacaatccgtacctgcggtataatcacgccgacgccgagtttcaggagcgtctgcaagaagatacgtcttttgggggcaacctcgggcgagcagtcttccaggccaagaagcgggttctcgaacctctcggtctggttgaggaaggcgctaagacggctcctggaaagaagagaccggtagagccgtcaccacagcgttcccccgactcctccacgggcatcggcaagaaaggccagcagcccgccagaaagagactcaatttcggtcagactggcgactcagagtcagtccccgaccctcaacctatcggagaacctccagcagcgccctctagtgtgggatctggtacaatggctgcaggcggtggcgcgccaatggcagacaataacgaaggtgccgacggagtgggtagttcctcgggaaattggcattgcgattccacatggctgggcgacagagtcatcaccaccagcacccgaacctgggccctgcccacctacaacaaccacctctacaagcaaacctccaacgggacctcgggaggcagcaccaacgacaacacctactttggctacagcaccccctgggggtattttgactttaacagattccactgccacttctcaccacgtgactggcagcgactcatcaacaacaactggggattccggcccaagagactcagcttcaagctcttcaacatccaggtcaaagaggtcacgcagaatgaaggcaccaagaccatcgccaataacctcaccagcaccatccaggtgtttacggactcggaataccagctgccgtacgtcctcggctctgcccaccagggctgcctgcctccgttcccggcggacgtcttcatgattcctcagtacggctacctgactctcaacaacggtagtcaggccgtgggacgttcctccttctactgcctggagtacttcccctctcagatgctgagaacgggcaacaacttttccttcagctacactttcgaggacgtgcctttccacagcagctacgcgcacagccagagtttggacaggctgatgaatcctctcatcgaccagtacctgtactacctgtcaagaacccagtctacgggaggcacagcgggaacccagcagttgctgttttctcaggccgggcctagcaacatgtcggctcaggccagaaactggctgcctggaccctgctacagacagcagcgcgtctccacgacactgtcgcaaaacaacaacagcaactttgcctggactggtgccaccaagtatcatctgaacggcagagactctctggtgaatccgggcgtcgccatggcaaccaacaaggacgacgaggaccgcttcttcccatccagcggcatcctcatgtttggcaagcagggagctggaaaagacaacgtggactatagcaacgtgatgctaaccagcgaggaagaaatcaagaccaccaaccccgtggccacagaacagtatggcgtggtggctgataacctacagcagcaaaacaccgctcctattgtgggggccgtcaacagccagggagccttacctggcatggtctggcagaaccgggacgtgtacctgcagggtcctatttgggccaagattcctcacacagatggcaactttcacccgtctcctttaatgggcggctttggacttaaacatccgcctcctcagatcctcatcaaaaacactcctgttcctgcggatcctccaacagcgttcaaccaggccaagctgaattctttcatcacgcagtacagcaccggacaagtcagcgcggagatcgagtgggagctgcagaaggagaacagcaagcgctggaacccagagattcagtatacttccaactactacaaatctacaaatgtggactttgctgttaatactgagggtgtttactctgagcctcgccccattggcactcgttacctcacccgtaatctgtaa

SEQ ID NO: 474 - protein, 738 aa, Adeno-associated virus
MAADGYLPDWLEDNLSEGIREWWALKPGAPKPKANQQKQDDGRGLVLPGYKYLGPFNGLDKGEPVNAADAAALEHDKAYDQQLQAGDNPYLRYNHADAEFQERLQEDTSFGGNLGRAVFQAKKRVLEPLGLVEEGAKTAPGKKRPVEPSPQRSPDSSTGIGKKGQQPARKRLNFGQTGDSESVPDPQPIGEPPAAPSSVGSGTMAAGGGAPMADNNEGADGVGSSSGNWHCDSTWLGDRVITTSTRTWALPTYNNHLYKQTSNGTSGGSTNDNTYFGYSTPWGYFDFNRFHCHFSPRDWQRLINNNWGFRPKRLSFKLFNIQVKEVTQNEGTKTIANNLTSTIQVFTDSEYQLPYVLGSAHQGCLPPFPADVFMIPQYGYLTLNNGSQAVGRSSFYCLEYFPSQMLRTGNNFSFSYTFEDVPFHSSYAHSQSLDRLMNPLIDQYLYYLSRTQSTGGTAGTQQLLFSQAGPSNMSAQARNWLPGPCYRQQRVSTTLSQNNNSNFAWTGATKYHLNGRDSLVNPGVAMATNKDDEDRFFPSSGILMFGKQGAGKDNVDYSNVMLTSEEEIKTTNPVATEQYGVVADNLQQQNTAPIVGAVNSQGALPGMVWQNRDVYLQGPIWAKIPHTDGNFHPSPLMGGFGLKHPPPQILIKNTPVPADPPTAFNQAKLNSFITQYSTGQVSAEIEWELQKENSKRWNPEIQYTSNYYKSTNVDFAVNTEGVYSEPRPIGTRYLTRNL

SEQ ID NO: 475 - DNA, 2217 bp, Adeno-associated virus
atggctgctgacggttatcttccagattggctcgaggacaacctctctgagggcattcgcgagtggtgggacctgaaacctggagcccccaagcccaaggccaaccagcagaagcaggacgacggccggggtctggtgcttcctggctacaagtacctcggacccttcaacggactcgacaagggggagcccgtcaacgcggcggacgcagcggccctcgagcacgacaaggcctacgaccagcagctcaaagcgggtgacaatccgtacctgcggtataatcacgccgacgccgagtttcaggagcgtctgcaagaagatacgtcttttgggggcaacctcgggcgagcagtcttccaggccaagaagcgggttctcgaacctctcggtctggttgaggaagctgctaagacggctcctggaaagaagagaccggtagaaccgtcacctcagcgttcccccgactcctccacgggcatcggcaagaaaggccagcagcccgctagaaagagactgaactttgggcagactggcgactcagagtcagtccccgaccctcaaccaatcggagaacctccagcagcgccctctagtgtgggatctggtacaatggccgcaggcggtggcgcaccaatggcagacaataacgaaggtgccgacggagtgggtagttcctcgggaaattggcattgcgattccacatggctgggcgacagagtcatcaccaccagcacccgaacctgggccctgcccacctacaacaaccacctctacaagcaaatctccaacgggacctcgggaggcagcaccaacgacaacacctactttggctacagcaccccctgggggtattttgactttaacagattccactgccacttctcaccacgtgactggcagcgactcatcaacaacaactggggattccggcccaagagactcagcttcaagctcttcaacatccaggtcaaagaggtcacgcagaatgaaggcaccaagaccatcgccaataacctcaccagcaccatccaggtgtttacggactcggaataccagctgccgtacgtcctcggctctgcccaccagggctgcctgcctccgttcccggcggacgtcttcatgattcctcagtacggctacctgactctcaacaacggtagtcaggccgtgggacgttcctccttctactgcctggagtacttcccctctcagatgctgagaacgggcaacaacttttccttcagctacactttcgaggacgtgcctttccacagcagctacgcgcacagccagagtttggacaggctgatgaatcctctcatcgaccagtacctgtactacctgtcaagaacccagtctacgggaggcacagcgggaacccagcagctgctgttttctcaggccgggcctagcaacatgtcggctcaggccagaaactggctgcctggaccctgctacagacagcagcgcgtctccacgacactgtcgcaaaacaacaacagcaactttgcctggactggtgccaccaagtatcatctgaacggcagagactctctggtgaatccgggcgtcgccatggcaaccaacaaggacgacgaggaccgcttcttcccatccagcggcatcctcatgtttggcaagcagggagctggaaaagacaacgtggactatagcaacgtgatgctaaccagcgaggaagaaatcaagaccaccaaccccgtggccacagaacagtatggcgtggtggctgataacctacagcagcaaaacaccgctcctattgtgggggccgtcaacagccagggagccttacctggcatggtctggcagaaccgggacgtgtacctgcagggtcctatttgggccaagattcctcacacagatggcaactttcacccgtctcctttaatgggcggctttggacttaaacatccgcctcctcagatcctcatcaaaagcactcctgttcctgcggatcctccaacagcgttcaaccaggccaagctgaattctttcatcacgcagtacagcaccggacaagtcagcgtggagatcgagtgggagctgcagaaggagaacagcaagtgctggaacccagagattcagtatacttccaactactacaaatctacaaatgtggactttgctgttaatactgagggtgtttactctgagcctcgccccattggcactcgttacctcacccgtaatctgtaa

SEQ ID NO: 476 - protein, 738 aa, Adeno-associated virus
MAADGYLPDWLEDNLSEGIREWWDLKPGAPKPKANQQKQDDGRGLVLPGYKYLGPFNGLDKGEPVNAADAAALEHDKAYDQQLKAGDNPYLRYNHADAEFQERLQEDTSFGGNLGRAVFQAKKRVLEPLGLVEEAAKTAPGKKRPVEPSPQRSPDSSTGIGKKGQQPARKRLNFGQTGDSESVPDPQPIGEPPAAPSSVGSGTMAAGGGAPMADNNEGADGVGSSSGNWHCDSTWLGDRVITTSTRTWALPTYNNHLYKQISNGTSGGSTNDNTYFGYSTPWGYFDFNRFHCHFSPRDWQRLINNNWGFRPKRLSFKLFNIQVKEVTQNEGTKTIANNLTSTIQVFTDSEYQLPYVLGSAHQGCLPPFPADVFMIPQYGYLTLNNGSQAVGRSSFYCLEYFPSQMLRTGNNFSFSYTFEDVPFHSSYAHSQSLDRLMNPLIDQYLYYLSRTQSTGGTAGTQQLLFSQAGPSNMSAQARNWLPGPCYRQQRVSTTLSQNNNSNFAWTGATKYHLNGRDSLVNPGVAMATNKDDEDRFFPSSGILMFGKQGAGKDNVDYSNVMLTSEEEIKTTNPVATEQYGVVADNLQQQNTAPIVGAVNSQGALPGMVWQNRDVYLQGPIWAKIPHTDGNFHPSPLMGGFGLKHPPPQILIKSTPVPADPPTAFNQAKLNSFITQYSTGQVSVEIEWELQKENSKCWNPEIQYTSNYYKSTNVDFAVNTEGVYSEPRPIGTRYLTRNL

SEQ ID NO: 477 - protein, 738 aa, Adeno-associated virus
MAADGYLPDWLEDNLSEGIREWWDLKPGAPKPKANQQKQDDGRGLVLPGYKYLGPFNGLDKGEPVNAADAAALEHDKAYDQQLKAGDNPYLRYNHADAEFQERLQEDTSFGGNLGRAVFQAKKRVLEPLGLVEEAAKTAPGKKRPVEPSPQRSPDSSTGIGKKGQQPARKRLNFGQTGDSESVPDPQPIGEPPAAPSSVGSGTMAAGGGAPMADNNEGADGVGSSSGNWHCDSTWLGDRVITTSTRTWALPTYNNHLYKQISNGTSGGSTNDNTYFGYSTPWGYFDFNRFHCHFSPRDWQRLINNNWGFRPKRLSFKLFNIQVKEVTQNEGTKTIANNLTSTIQVFTDSEYQLPYVLGSAHQGCLPPFPADVFMIPQYGYLTLNNGSQAVGRSSFYCLEYFPSQMLRTGNNFSFSYTFEDVPFHSSYAHSQSLDRLMNPLIDQYLYYLSRTQSTGGTAGTQQLLFSQAGPSNMSAQARNWLPGPCYRQQRVSTTLSQNNNSNFAWTGATKYHLNGRDSLVNPGVAMATNKDDEDRFFPSSGILMFGKQGAGKDNVDYSNVMLTSEEEIKTTNPVATEQYGVVADNLQQQNTAPIVGAVNSQGALPGMVWQNRDVYLQGPIWAKIPHTDGNFHPSPLMGGFGLKHPPPQILIKSTPVPADPPTAFNQAKLNSFITQYSTGQVSVEIEWELQKENSKRWNPEIQYTSNYYKSTNVDFAVNTEGVYSEPRPIGTRYLTRNL

SEQ ID NO: 478 - DNA, 2217 bp, Adeno-associated virus
atggctgctgacggttatcttccagattggctcgaggacaacctctctgagggcattcgcgagtggtgggacctgaaacctggagcccccaagcccaaggccaaccagcagaagcaggacgacggccggggtctggtgcttcctggctacaagtacctcggacccttcaacggactcgacaagggggagcccgtcaacgcggcggacgcagcggccctcgagcacgacaaggcctacgaccagcagctcaaagcgggtgacaatccgtacctgcggtataaccacgccgacgccgagtttcaggagcgtctgcaagaagatacgtcttttgggggcaacctcgggcgagcagtcttccaggccaagaagcgggttctcgaacctctcggtctggttgaggaagctgctaagacggctcctggaaagaagagaccggtagaaccgtcacctcagcgttcccccgactcctccacgggcatcggcaagaaaggccagcagcccgctagaaagagactgaactttgggcagactggcgactcagagtcagtccccgaccctcaaccaatcggagaaccaccagcaggcccctctggtctgggatctggtacaatggctgcaggcggtggcgcaccaatggctgacaataacgagggcgccgacggagtgggtaatgcctcaggaaattggcattgcgattccacatggctgggcgacagagtcatcaccaccagcacccgaacctgggctttgcccacctacaacaaccacctctacaagcaaatctccagtcagtcagcaggtagcaccaacgacaacgtctacttcggctacagcaccccctgggggtattttgacttcaacagattccactgtcacttctcaccacgtgactggcagcggctcatcaacaacaactggggattccggcccaagaagctcaacttcaagctgttcaacatccaggtcaaggaggtcacaacgaatgacggcgtcacgaccatcgccaataaccctaccagcacggttcaggtcttttcggactcggaataccagctgccctacgtcctcggctccgcacaccagggctgcctgcctccgttcccggcggacgtcttcatgattccccagtacggctacctgactctgaacaatggcagccaatcggtgggtcgttcctctttctactgcctggaatatttcccttctcaaatgctgagaacgggcaacaacttcaccttcagctacaccttcgaggacgttcccttccacagcagctacgcacacagccagagcctggaccggctgatgaatcctcttatcgaccagtacctgtattacctggccagaacacagagcaacgcaggaggcacagctggcaatcgggaactgcagttttatcagggcgggcctaccaccatggccgaacaagccaaaaactggctgcctggaccctgctacagacagcagcgcgtctccacgacactgtcgcaaaacaacaacagcaactttgcctggactggtgccaccaagtatcatctgaacggcagagactctctggtgaatccgggcgtcgccatggcaaccaacaaggacgacgaggaccgcttcttcccatccagcggcatcctcatgtttggcaagcagggagctggaaaagacaacgtggactatagcaacgtgatgctaaccagcgaggaagaaatcaagaccaccaaccccgtggccacagaacagtatggcgtggtggctgataacctacagcagcaaaacaccgctcctattgtgggggccgtcaacagccagggagccttacctggcatggtctggcagaaccgggacgtgtacctgcagggtcctatttgggccaagattcctcacacagatggcaactttcacccgtctcctttaatgggcggctttggacttaaacatccgcctcctcagatcctcatcaaaaacactcctgttcctgcggatcctccaacagcgttcaaccaggccaagctgaattctttcatcacgcagtacagcaccggacaagtcagcgtggagatcgagtgggagctgcagaaggagaacagcaagcgctggaacccagagattcagtatacttccaactactacaaatctacaaatgtggactttgctgttaatactgagggtgtttactctgagcctcgccccattggcactcgttacctcacccgtaatctgtaa

SEQ ID NO: 479 - protein, 738 aa, Adeno-associated virus
MAADGYLPDWLEDNLSEGIREWWDLKPGAPKPKANQQKQDDGRGLVLPGYKYLGPFNGLDKGEPVNAADAAALEHDKAYDQQLKAGDNPYLRYNHADAEFQERLQEDTSFGGNLGRAVFQAKKRVLEPLGLVEEAAKTAPGKKRPVEPSPQRSPDSSTGIGKKGQQPARKRLNFGQTGDSESVPDPQPIGEPPAGPSGLGSGTMAAGGGAPMADNNEGADGVGNASGNWHCDSTWLGDRVITTSTRTWALPTYNNHLYKQISSQSAGSTNDNVYFGYSTPWGYFDFNRFHCHFSPRDWQRLINNNWGFRPKKLNFKLFNIQVKEVTTNDGVTTIANNPTSTVQVFSDSEYQLPYVLGSAHQGCLPPFPADVFMIPQYGYLTLNNGSQSVGRSSFYCLEYFPSQMLRTGNNFTFSYTFEDVPFHSSYAHSQSLDRLMNPLIDQYLYYLARTQSNAGGTAGNRELQFYQGGPTTMAEQAKNWLPGPCYRQQRVSTTLSQNNNSNFAWTGATKYHLNGRDSLVNPGVAMATNKDDEDRFFPSSGILMFGKQGAGKDNVDYSNVMLTSEEEIKTTNPVATEQYGVVADNLQQQNTAPIVGAVNSQGALPGMVWQNRDVYLQGPIWAKIPHTDGNFHPSPLMGGFGLKHPPPQILIKNTPVPADPPTAFNQAKLNSFITQYSTGQVSVEIEWELQKENSKRWNPEIQYTSNYYKSTNVDFAVNTEGVYSEPRPIGTRYLTRNL

SEQ ID NO: 480 - DNA, 2208 bp, Adeno-associated virus
atggctgccgatggttatcttccagattggctcgaggacaacctctctgagggcattcacgagtggtgggacccgaaacctggagccccgaaacccaaagccaaccagcaaaagcaggacgacggccggggtctggtgcttcctggctacaagtacctcggacccttcaacggactcgacaagggggagcccgtcaacgcggcggacgcagcggccctcgagcacgacaaggcctacgaccagcagctcaaagcgggtgacaatccgtacctgcggtataatcacgccgacgccgagtttcaggagcgtctgcaagaagatacgtcttttgggggcaacctcgggcgagcagtcttccaggccaagaagcgggttctcgaacctctcggtctggttgaggaaggcgctaagacggctcctggaaagaagagaccggtagagccgtcaccacagcgttcccccgactcctccacgggcatcggcaagaaaggccagcagcccgccagaaagagactcaatttcggtcagactggcgactcagagtcagtccccgaccctcaacctatcggagaacctccagcagcgccctctagtgtgggatctggtacaatggctgcaggcggtggcgcaccaatggcagacaataacgaaggtgccgacggagtgggtagttcctcgggaaattggcattgcgattccacatggctgggcgacagagtcatcaccaccagcacccgaacctgggccctgcccacccacaacaaccacctctacaagcaaatctccaacgggacctcgggaggcagcaccaacgacaacgtctacttcggctacagcaccccctgggggtattttgacttcaacagattccactgtcacttctcaccacgtgaccggcagcgactcatcaacaacaactggggattccggcccaagagactcagcttcaagctcttcaacatccaggtcaaagaggtcacgcagaatgaaggcaccaagaccatcgccaataacctcaccagcaccatccaggtgtttacggactcggaataccagctgccgtacgtcctcggctctgcccaccagggctgcctgcctccgttcccggcggacgtcttcatgattcctcagtacggctacctgactctcaacaacggtagtcaggccgtgggacgttcctccttctactgcctggagtacttcccctctcagatgctgagaacgggcaacaacttttccttcagctacactttcgaggacgtgcctttccacagcagctacgcgcacagccagagtttggacaggctgatgaatcctctcatcgaccagtacctgtactacctgtcaagaacccagtctacggaaggcacagcgggaacccagcagttgctgttttctcaggccgggcctagcaacatgtcggctcaggccagaaactggctgcctggaccctgctacagacagcagcgcgtctccacgacactgtcgcaaaacaacaacagcaactttgcctggactggtgccaccaagtatcatctgaacggcagagactctctggtgaatccgggcgtcgccatggcaacccacaaggacgacgaggaacgcttcttcccttcgagcggagtcctgatttttggaaaaactggagcagctaataagactacactggaaaatgtgttaatgacaaatgaagaggaaattcgtcctaccaacccggtagccaccgaggaatacgggactgttagcagcaacctgcaggcggctaacactgcagcccagacacaagttgtcaacaaccagggagccttacctggtatggtctggcagaaccgggacgtgtacctgcagggtcccatctgggccaagattcctcacacggacggcaactttcacccgtctccgctgatgggcggctttggactgaagcatcctcagatcctgatcaaaaacactcctgttcctgctaatcccccggaggtgtttacgcctgccaagtttgcttctttcatcacacagtacagcaccggccaggtcagcgtggagatcgagtgggagctgcagaaggagaacagcaagcgctggaacccagagattcagtatacctccaattttgacaaacagactggtgtggactttgccgttgacagccagggtgtttattctgagcctcgccccattggtactcgttacctcacccgtaatctgtaa

SEQ ID NO: 481 - protein, 735 aa, Adeno-associated virus
MAADGYLPDWLEDNLSEGIHEWWDPKPGAPKPKANQQKQDDGRGLVLPGYKYLGPFNGLDKGEPVNAADAAALEHDKAYDQQLKAGDNPYLRYNHADAEFQERLQEDTSFGGNLGRAVFQAKKRVLEPLGLVEEGAKTAPGKKRPVEPSPQRSPDSSTGIGKKGQQPARKRLNFGQTGDSESVPDPQPIGEPPAAPSSVGSGTMAAGGGAPMADNNEGADGVGSSSGNWHCDSTWLGDRVITTSTRTWALPTHNNHLYKQISNGTSGGSTNDNVYFGYSTPWGYFDFNRFHCHFSPRDRQRLINNNWGFRPKRLSFKLFNIQVKEVTQNEGTKTIANNLTSTIQVFTDSEYQLPYVLGSAHQGCLPPFPADVFMIPQYGYLTLNNGSQAVGRSSFYCLEYFPSQMLRTGNNFSFSYTFEDVPFHSSYAHSQSLDRLMNPLIDQYLYYLSRTQSTEGTAGTQQLLFSQAGPSNMSAQARNWLPGPCYRQQRVSTTLSQNNNSNFAWTGATKYHLNGRDSLVNPGVAMATHKDDEERFFPSSGVLIFGKTGAANKTTLENVLMTNEEEIRPTNPVATEEYGTVSSNLQAANTAAQTQVVNNQGALPGMVWQNRDVYLQGPIWAKIPHTDGNFHPSPLMGGFGLKHPQILIKNTPVPANPPEVFTPAKFASFITQYSTGQVSVEIEWELQKENSKRWNPEIQYTSNFDKQTGVDFAVDSQGVYSEPRPIGTRYLTRNL

SEQ ID NO: 482 - protein, 738 aa, Adeno-associated virus
MAADGYLPDWLEDNLSEGIREWWDLKPGAPKPKANQQKQDDGRGLVLPGYKYLGPFNGLDKGEPVNAADAAALEHDKAYDQQLKAGDNPYLRYNHADAEFQERLQEDTSFGGNLGRAVFQAKKRVLEPLGLVEEGAKTAPGKKRPVEPSPQRSPDSSTGIGKKGQQPARKRLNFGQTGDSESVPDPQPIGEPPAAPSSVGSGTMAAGGGAPMADNNEGADGVGSSSGNWHCDSTWLGDRVITTSTRTWALPTYNNHLYKQISNGTSGGSTNDNTYFGYSTPWGYFDFNRFHCHFSPRDWQRPINNNWGFRPKRLSFKLFNIQVKEVTQNEGTKTIANNLTSTIQVFTDSEYQLPYVLGSAHQGCLPPFPADVFMIPQYGYLTLNNGSQAVGRSSFYCLEYFPSQMLRTGNNFSFSYPFEDVPFHSSYAHSQSLDRLMNPLIDQYLYYLSRTQSTGGTAGTQQLLFSQAGPSNMSAQARNWLPGPCYRQQRVSTTLSQNNNSNFAWTGATKYHLNGRDSLVNPGVAMATNKDDEDRFFPSSGILMFGKQGAGKDNVDYSNVMLTSEEEIKTTNPVATEQYGVVADNLQQQDTAPIVGAVNSQGALPGMVWQNRDVYLQGPIWAKIPHTDGNFHPSPLMGGFGLKHPPPQVLIKNTPVPADPPTAFNQAKLNSFITQYSTGQVSVEIEWELQKENSKRWNPEIQYTSNYYKSTNVDFAVNTEGVYSEPRPIGTRYLTRNL

SEQ ID NO: 483 - DNA, 2217 bp, Adeno-associated virus
atggctgccgatggttatcttccagattggctcgaggacaacctctctgagggcattcgcgagtggtgggacctgaaacctggagccccgaaacccaaggccaaccagcaaaagcaggacgacggccggggtctggtgcttcctggctacaagtacctcggacccttcaacggactcgacaagggggagcccgtcaacgcggcggacgcagcggccctcgagcacgacaaggcctacgaccagcagctcaaagcgggtgacaatccgtacctgcggtataatcacgccgacgccgagtttcaggagcgtctgcaagaagatacgtcttttgggggcaacctcgggcgagcagtcttccaggccaagaagcgggttctcgaacctctcggtctggttgaggaaggcgctaagacggctcctggaaagaagagaccggtagagccgtcaccacagcgttcccccgactcctccacgggcatcggcaagaaaggccagcagcccgccagaaagagactcaatttcggtcagactggcgactcagagtcagtccccgaccctcaacctatcggagaacctccagcagcgccctctagtgtgggatctggtacaatggctgcaggcggtggcgcaccaatggcagacaataacgaaggtgccgacggagtgggtagttcctcgggaaattggcattgcgattccacatggctgggcgacagagtcatcaccaccagcacccgaacctgggccctgcccacctacaacaaccacctctacaagcaaatctccaacgggacctcgggaggcagcaccaacgacaacacctactttggctacagcaccccctgggggtattttgactttaacagattccactgccacttctcaccacgtgactggcagcgacccatcaacaacaactggggattccggcccaagagactcagcttcaagctcttcaacatccaggtcaaagaggtcacgcagaatgaaggcaccaagaccatcgccaataacctcaccagcaccatccaggtgtttacggactcggaataccagctgccgtacgtcctcggctctgcccaccagggctgcctgcctccgttcccggcggacgtcttcatgattcctcagtacggctacctgactctcaacaacggtagtcaggccgtgggacgttcctccttctactgcctggagtacttcccctctcagatgctgagaacgggcaacaacttttccttcagctaccctttcgaggacgtgcctttccacagcagctacgcgcacagccagagtttggacaggctgatgaatcctctcatcgaccagtacctgtactacctgtcaagaacccagtctacgggaggcacagcgggaacccagcagttgctgttttctcaggccgggcctagcaacatgtcggctcaggccagaaactggctgcctggaccctgctacagacagcagcgcgtctccacgacactgtcgcaaaacaacaacagcaactttgcctggactggtgccaccaagtatcatctgaacggcagagactctctggtgaatccgggcgtcgccatggcaaccaacaaggacgacgaggaccgcttcttcccatccagcggcatcctcatgtttggcaagcagggagctggaaaagacaacgtggactatagcaacgtgatgctaaccagcgaggaagaaatcaagaccaccaaccccgtggccacagaacagtatggcgtggtggctgataacctacagcagcaagacaccgctcctattgtgggggccgtcaacagccagggagccttacctggcatggtctggcagaaccgggacgtgtacctgcagggtcctatttgggccaagattcctcacacagatggcaactttcacccgtctcctttaatgggcggctttggacttaaacatccgcctcctcaggtcctcatcaaaaacactcctgttcctgcggatcctccaacagcgttcaaccaggccaagctgaattctttcatcacgcagtacagcaccggacaagtcagcgtggagatcgagtgggagctgcagaaggagaacagcaagcgctggaacccagagattcagtatacttccaactactacaaatctacaaatgtggactttgctgttaatactgagggtgtttactctgagcctcgccccattggcactcgttacctcacccgtaatctgtaa

SEQ ID NO: 484 - DNA, 2214 bp, Adeno-associated virus
atggctgctgacggttatcttccagattggctcgaggacaacctctctgagggcattcgcgagtggtgggacctgaaacctggagcccccaagcccaaggccaaccagcagaagcaggacgacggccggggtctggtgcttcctggctacaagtacctcggacccttcaacggactcgacaagggggagcccgtcaacgcggcggacgcagcggccctcgagcacgacaaggcctacgaccagcagctcaaagcgggtgacaatccgtacctgcggtataaccacgccgacgccgagttccaggagcgtctgcaagaagatacgtcttttgggggcaacctcgggcgagcagtcttccaggccaagaagcgggttctcgaacctctcggtctggctgaggaagctgctaagacggctcctggaaagaagagaccggtagaaccgtcacctcagcgttcccccgactcctccacgggcatcggcaagaaaggccagcagcccgctagaaagagactgaactttgggcagactggcgactcagagtcagtccccgaccctcaaccaatcggagagccaccagcaggcccctctggtctgggatctggtacaatggctgcaggcggtggcgcaccaatggctgacaataacaagggcgccgacggagtgggtaatgcctcaggaaattggcattgcgattccacatggctgggcgacagagtcatcaccaccagcacccgaacctgggctttgcccacctacaacaaccacctctacaagcaaatctccagtcagtcagcaggtagcaccaacgacaacgtctacttcggctacagcaccccctgggggtattttgacttcaacagattccactgtcacttctcaccacgtgactggcagcggctcatcaacaacaactggggattccggcccaagaagctcaacttcaagctgttcaacatccaggtcaaggaggtcacaacgggtgacggcgtcacgaccatcgccaataaccttaccagcacggttcaggtcttttcggactcggaataccagctgccctacgtcctcggctccgcacaccagggctgcctgcctccgttcccggcggacgtcttcatgattccccagtacggctacctgactctgaacaatgacagccaatcggtgggtcgttcctctttctactgcctggaatatttcccttctcaaatgctgagaacgggcaacaacttcaccttcagctacaccttcgaggacgttcccttccacagcagctacgcacacagccagagcctggaccggctgatgaatcctcttatcgaccagtacctgtattacctggccagaacacagagcaacgcaggaggcacagctggcaatcgggaactgcagttttatcagggcgggcctaccaccatggccgaacaagccaaaaactggctgcctggaccttgcttccggcaacaaagagtctccaagacgctggatcaaaacaacaacagcaactttgcttggactggtgccaccaaataccatctaaatggaagaaattcattggttaatcccggtgtcgccatggcaacccacaaggacgacgaggaacgcttcttcccttcgagcggagtcctgatttttggaaaaactggagcagctaataagactacactggaaaatgtgttaatgacaaatgaagaggaaattcgtcctaccaacccggtagccaccgaggaatacgggactgttagcagcaacctgcaggcggctaacactgcagcccagacacaagttgtcaacaaccagggagccttacctggtatggtctggcagaaccgggacgtgtacctgcagggtcccatctgggccaagattcctcacacggacggcaactttcacccgtctccgctgatgggcggctttggactgaagcatccgcctcctcagatcctgatcaaaaacactcctgttcctgctaatcccccggaggtgtttacgcctgccaagtttgcttctttcatcacacagtacagcaccggccaggtcagcgtggagatcgagtgggagctgcagaaggagaacagcaagcgctggaacccagagattcagtatacctccaattttgacaaacagactggtgtggactttgccgttgacagccagggtgtttattctgagcctcgccccattggtactcgttacctcacccgtaatctgtaa

SEQ ID NO: 485 - protein, 737 aa, Adeno-associated virus
MAADGYLPDWLEDNLSEGIREWWDLKPGAPKPKANQQKQDDGRGLVLPGYKYLGPFNGLDKGEPVNAADAAALEHDKAYDQQLKAGDNPYLRYNHADAEFQERLQEDTSFGGNLGRAVFQAKKRVLEPLGLAEEAAKTAPGKKRPVEPSPQRSPDSSTGIGKKGQQPARKRLNFGQTGDSESVPDPQPIGEPPAGPSGLGSGTMAAGGGAPMADNNKGADGVGNASGNWHCDSTWLGDRVITTSTRTWALPTYNNHLYKQISSQSAGSTNDNVYFGYSTPWGYFDFNRFHCHFSPRDWQRLINNNWGFRPKKLNFKLFNIQVKEVTTGDGVTTIANNLTSTVQVFSDSEYQLPYVLGSAHQGCLPPFPADVFMIPQYGYLTLNNDSQSVGRSSFYCLEYFPSQMLRTGNNFTFSYTFEDVPFHSSYAHSQSLDRLMNPLIDQYLYYLARTQSNAGGTAGNRELQFYQGGPTTMAEQAKNWLPGPCFRQQRVSKTLDQNNNSNFAWTGATKYHLNGRNSLVNPGVAMATHKDDEERFFPSSGVLIFGKTGAANKTTLENVLMTNEEEIRPTNPVATEEYGTVSSNLQAANTAAQTQVVNNQGALPGMVWQNRDVYLQGPIWAKIPHTDGNFHPSPLMGGFGLKHPPPQILIKNTPVPANPPEVFTPAKFASFITQYSTGQVSVEIEWELQKENSKRWNPEIQYTSNFDKQTGVDFAVDSQGVYSEPRPIGTRYLTRNL

SEQ ID NO: 486 - DNA, 2217 bp, Adeno-associated virus
atggctgccgatggttatcttccagattggctcgaggacaacctctctgagggcattcgcgagtggtgggacctgaaacctggagccccgaaacccaaagccaaccagcaaaagcaggacgacggccggggtctggtgcttcctggctacaagtacctcggacccttcaacggactcgacaagggggagcccgtcaacgcggcggacgcagcggccctcgagcacgacaaggcctacgaccagcagctcaaagcgggtgacaatccgtacctgcggtataatcacgccgacgccgagtttcaggagcgtctgcaagaagatacgtcttttgggggcaacctcgggcgagcagtcttccaggccaagaagcgggttctcgaacctctcggtctggttgaggaaggcgctaagacggctcctggaaagaagagaccggtagagccgtcaccacagcgttcccccgactcctccacgggcatcggcaagaaaggccagcagcccgccagaaagagactcaatttcggtcagactggcgactcagagtcagtccccgaccctcaacctatcggagaacctccagcagcgccctctagtgtgggatctggtacaatggctgcaggcggtggcgcaccaatggcagacaataacgaaggtgccgacggagtgggtagttcctcgggaaattggcattgcgattccacatggctgggcgacagagtcatcaccaccagcacccgaacctgggccctgcccacctacaacaaccacctctacaagcaaatctccaacgggacctcgggaggcagcaccaacgacaacacctactttggctacagcaccccctgggggtattttgactttaacagattccactgccacttctcaccacgtgactggcagcgactcatcaacaacaactggggattccggcccaagagactcagcttcaagctcttcaacatccaggtcaaagaggtcacgcagaatgaaggcaccaagaccatcgccaataacctcaccagcaccatccaggtgtttacggactcggaataccagctgccgtacgtcctcggctctgcccaccagggctgcctgcctccgttcccggcggacgtcttcatgattcctcagtacggctacctgactctcaacaacggtagtcaggccgtgggacgttcctccttctactgcctggagtacttcccctctcagatgctgagaacgggcaacaacttttccttcagctacactttcgaggacgtgcctttccacagcagctacgcgcacagccagagtttggacaggctgatgaatcctctcatcgaccagtacctgtactacctgtcaagaacccagtctacgggaggcacagcgggaacccagcagttgctgttttctcaggccgggcctagcaacatgtcggctcaggccagaaactggctgcctggaccctgctacagacagcagcgcgtctccacgacactgtcgcaaaacaacaacagcaactttgcctggactggtgccaccaagtatcatctgaacggcagagactctctggtgaatccgggcgtcgccatggcaaccaacaaggacgacgaggaccgcttcttcccatccagcggcatcctcatgtttggcaagcagggagctggaaaagacaacgtggactatagcaacgtgatgctaaccagcgaggaagaaatcaagaccaccaaccccgtggccacagaacagtatggcgtggtggctgataacctacagcagcaaaacaccgctcctattgtgggggccgtcaacagccagggagccttacctggcatggtctggcagaaccgggacgtgtacctgcagggtcctatttgggccaagattcctcacacagatggcaactttcacccgtctcctttaatgggcggctttggacttaaacatccgcctcctcagatcctcatcaaaaacactcctgttcctgcggatcctccaacagcgttcaaccaggccaagctgaattctttcatcacgcagtacagcaccggacaagtcagcgtggagatcgtgtgggagctgcagaaggagaacagcaagcgcaggaacccagagattcagtatacttccaactactacaaatctacaaatgtggactttgctgttaatactgagggtgtttactctgagcctcgccccattggcactcgttacctcacccgtaatctgtaa

SEQ ID NO: 487 - protein, 738 aa, Adeno-associated virus
MAADGYLPDWLEDNLSEGIREWWDLKPGAPKPKANQQKQDDGRGLVLPGYKYLGPFNGLDKGEPVNAADAAALEHDKAYDQQLKAGDNPYLRYNHADAEFQERLQEDTSFGGNLGRAVFQAKKRVLEPLGLVEEGAKTAPGKKRPVEPSPQRSPDSSTGIGKKGQQPARKRLNFGQTGDSESVPDPQPIGEPPAAPSSVGSGTMAAGGGAPMADNNEGADGVGSSSGNWHCDSTWLGDRVITTSTRTWALPTYNNHLYKQISNGTSGGSTNDNTYFGYSTPWGYFDFNRFHCHFSPRDWQRLINNNWGFRPKRLSFKLFNIQVKEVTQNEGTKTIANNLTSTIQVFTDSEYQLPYVLGSAHQGCLPPFPADVFMIPQYGYLTLNNGSQAVGRSSFYCLEYFPSQMLRTGNNFSFSYTFEDVPFHSSYAHSQSLDRLMNPLIDQYLYYLSRTQSTGGTAGTQQLLFSQAGPSNMSAQARNWLPGPCYRQQRVSTTLSQNNNSNFAWTGATKYHLNGRDSLVNPGVAMATNKDDEDRFFPSSGILMFGKQGAGKDNVDYSNVMLTSEEEIKTTNPVATEQYGVVADNLQQQNTAPIVGAVNSQGALPGMVWQNRDVYLQGPIWAKIPHTDGNFHPSPLMGGFGLKHPPPQILIKNTPVPADPPTAFNQAKLNSFITQYSTGQVSVEIVWELQKENSKRRNPEIQYTSNYYKSTNVDFAVNTEGVYSEPRPIGTRYLTRNL

SEQ ID NO: 488 - protein, 738 aa, Adeno-associated virus
MAADGYLPDWLEDNLSEGIREWWDLKPGAPKPKANQQKQDDGRGLVLPGYKYLGPFNGLDKGEPVNAADAAALEHDKAYDQQLKAGDNPYLRYNHADAEFQERLQEDTSFGGNLGRAVFQAKKRVLEPLGLVEEGAKTAPGKKRPVEPSPQRSPDSSTGIGKKGQQPARKRLNFGQTGDSESVPDPQPIGEPPAAPSSVGSGTMAAGGGAPMADNNEGADGVGSSSGNWHCDSTWLGDRVITTSTRTWALPTYNNHLYKQISNGTSGGSTNDNTYFGYSTPWGYFDFNRFHCHFSPRDWQRLINNNWGFRPKRLSFKLFNIQVKEVTQNEGTKTIANNLTSTIQVFTDSEYQLPYVLGSAHQGCLPPFPADVFMIPQYGYLTLNNGSQAVGRSSFYCLEYFPSQMLRTGNNFSFSYTFEDVPFHSSYAHSQSLDRLMNPLIDQYLYYLSRTQSTGGTAGTQQLLFSQAGPSNMSAQARNWLPGPCYRQQRVSTTLSQNNNSNFAWTGATKYHLNGRDSLVNPGVAMATNKDDEDRFFPSSGILMFGKQGAGKDNVDYSNVMLTSEEEIKTTNPVATEQYGVVADNLQQQNTAPIVGAVNSQGALPGMVWQNRDVYLQGPIWAKIPHTDGNFHPSPLMGGFGLKHPPPQILIKNTPVPADPPTAFNQAKLNSFITQYSTGQVSVEIEWELQKENSKRWNPEIQYTSNYYKSTNVDFAVNTEGVYSEPRPIGTRYLTRNL

SEQ ID NO: 489 - protein, 738 aa, Adeno-associated virus
MAADGYLPDWLEDNLSEGIREWWDLKPGAPKPKANQQKQDDGRGLVLPGYKYLGPFNGLDKGEPVNAADAAALEHDKAYDQQLKAGDNPYLRYNHADAEFQERLQEDTSFGGNLGRAVFQAKKRVLEPLGLVEEGAKTAPGKKRPVEPSPQRSPDSSTGIGKKGQQPARKRLNFGQTGDSESVPDPQPIGEPPAAPSSVGSGTMAAGGGAPMADNNEGADGVGSSSGNWHCDSTWLGDRVITTSTRTWALPTYNNHLYKQISNGTSGGSTNDNTYFGYSTPWGYFDFNRFHCHFSPRDWQRLINNNWGFRPKRLSFKLFNIQVKEVTQNEGTKTIANNLTSTIQVFTDSEYQLPYVLGSAHQGCLPPFPADVFMIPQYGYLTLNNGSQAVGRSSFYCLEYFPSQMLRTGNNFSFSYTFEDVPFHSSYAHSQSLDRLMNPLIDQYLYYLSRTQSTGGTAGTQQLLFSQAGPSNMSAQARNWLPGPCYRQQRVSTTLSQNNNSNFAWTGATKYHLNGRDSLVNPGVAMATNKDDEDRFFPSSGILMFGKQGAGKDNVDYSNVMLTSEEEIKTTNPVATEQYGVVADNLQQQNTAPIVGAVNSQGALPGMVWQNRDVYLQGPIWAKIPHTDGNFHPSPLMGGFGLKHPPPQILIKNTPVPADPPTAFNQAKLNSFITQYSTGQVSVEIVWELQKENSKRWNPEIQYTSNYYKSTNVDFAVNTEGVYSEPRPIGTRYLTRNL

SEQ ID NO: 490 - protein, 738 aa, Adeno-associated virus; identical to SEQ ID NO: 488

SEQ ID NO: 491 - DNA, 2214 bp, Adeno-associated virus
atggctgctgacggttatcttccagattggctcgaggacaacctctctgagggcattcgcgagtggtgggacctgaaacctggagcccccaagcccaaggccaaccagcagaagcaggacgacggccggggtctggtgcttcctggctacaagtacctcggacccttcaacggactcgacaagggggagcccgtcaacgcggcggacgcagcggccctcgagcacgacaaggcctacgaccagcagctcaaagcgggtgacaatccgtacctgcggtataaccacgccgacgccgagtttcaggagcgtctgcaagaagatacgtcttttgggggcaacctcgggcgagcagtcttccaggccaagaagcgggttctcgaacctctcggtctggttgaggaagctgctaagacggctcctggaaagaagagaccggtagaaccgtcacctcagcgttcccccgactcctccacgggcatcggcaagaaaggccagcagcccgctagaaagagactgaactttgggcagactggcgactcagagtcagtccccgaccctcaaccaatcggagaaccaccagcaggcccctctggtctgggatctggtacaatggctgcaggcggtggcgctccaatggcagacaataacgaaggcgccgacggagtgggtaatgcctcaggaaattggcattgcgattccacatggctgggcgacagagtcatcaccaccagcacccgaacctgggctttgcccacctacaacaaccacctctacaagcaaatctccagtcagtcagcaggtagcaccaacgacaacgtctacttcggctacagcaccccctgggggtattttgacttcaacagattccactgtcacttctcaccacgtgactggcagcggctcatcaacaacaactggggattccggcccaagaagctcaacttcaagctgttcaacatccaggtcaaggaggtcacaacgaatgacggcgtcacgaccatcgccaataaccttaccagcacggttcaggtcttttcggactcggaataccagctgccctacgtcctcggctccgcacaccagggctgcctgcctccgttcccggcggacgtcttcatgattccccagtacggctacctgactctgaacaatggcagccaatcggtgggtcgttcctctttctactgcctggaatatttcccttctcaaatgctgagaacgggcaacaacttcaccttcagctacaccttcgaggacgttcccttccacagcagctacgcacacagccagagcctggaccggctgatgaatcctcttatcgaccagtacctgtattacctggccagaacacagagcaacgcaggaggcacagctggcaatcgggaactgcagttttatcagggcgggcctaccaccatggccgaacaagccaaaaactggctgcctagaccttgcttccggcaacaaagagtctccaagacgctggatcaaaacaacaacagcaactttgcttggactggtgccaccaaataccatctaaatggaagaaattcattggttaatcccggtgtcgccatggcaacccacaaggacgacgaggaacgcttcttcccttcgagcggagtcctgatttttggaaaaactggagcagctaataagactacactggaaaatgtgttaatgacaaatgaagaggaaattcgtcctaccaacccggtagccaccgaggaatacgggactgttagcagcaacctgcaggcggctaacactgcagcccagacacaagttgtcaacaaccagggagccttacctggtatggtctggcagaaccgggacgtgtacctgcagggtcccatctgggccaagattcctcacacggacggcaactttcacccgtctccgctgatgggcggctttggactgaagcatccgcctcctcagatcctgatcaaaaacactcctgttcctgctaatcccccggaggtgtttacgcctgccaagtttgcttctttcatcacacagtacagcaccggccaggtcagcgtggagatcgagtgggagctgcagaaggagaacagcaagcgctggaacccagagattcagtatacctccaattttgacaaacagactggtgtggactttgccgttgacagccagggtgtttattctgagcctcgccccattggtactcgttacctcacccgtaatctgtaa

SEQ ID NO: 492 - protein, 737 aa, Adeno-associated virus
MAADGYLPDWLEDNLSEGIREWWDLKPGAPKPKANQQKQDDGRGLVLPGYKYLGPFNGLDKGEPVNAADAAALEHDKAYDQQLKAGDNPYLRYNHADAEFQERLQEDTSFGGNLGRAVFQAKKRVLEPLGLVEEAAKTAPGKKRPVEPSPQRSPDSSTGIGKKGQQPARKRLNFGQTGDSESVPDPQPIGEPPAGPSGLGSGTMAAGGGAPMADNNEGADGVGNASGNWHCDSTWLGDRVITTSTRTWALPTYNNHLYKQISSQSAGSTNDNVYFGYSTPWGYFDFNRFHCHFSPRDWQRLINNNWGFRPKKLNFKLFNIQVKEVTTNDGVTTIANNLTSTVQVFSDSEYQLPYVLGSAHQGCLPPFPADVFMIPQYGYLTLNNGSQSVGRSSFYCLEYFPSQMLRTGNNFTFSYTFEDVPFHSSYAHSQSLDRLMNPLIDQYLYYLARTQSNAGGTAGNRELQFYQGGPTTMAEQAKNWLPRPCFRQQRVSKTLDQNNNSNFAWTGATKYHLNGRNSLVNPGVAMATHKDDEERFFPSSGVLIFGKTGAANKTTLENVLMTNEEEIRPTNPVATEEYGTVSSNLQAANTAAQTQVVNNQGALPGMVWQNRDVYLQGPIWAKIPHTDGNFHPSPLMGGFGLKHPPPQILIKNTPVPANPPEVFTPAKFASFITQYSTGQVSVEIEWELQKENSKRWNPEIQYTSNFDKQTGVDFAVDSQGVYSEPRPIGTRYLTRNL

SEQ ID NO: 493 - DNA, 2214 bp, Adeno-associated virus
atggctgctgacggttatcttccagattggctcgaggacaacctctctgagggcattcgcgagtggtgggacctgaaacctggagcccccaagcccaaggccaaccagcagaagcaggacgacggccggggtctggtgcttcctggctacaagtacctcggacccttcaacggactcgacaagggggagcccgtcaacgcggcggacgcagcggccctcgagcacgacaaggcctacgaccagcagctcaaagcgggtgacaatccgtacctgcggtataaccatgccgacgccgagtttcaggagcgtctgcaagaagatacgtcttttgggggcaacctcgggcgagcagtcctccaggccaagaagcgggttctcgaacctctcggtctggttgaggaagctgctaagacggctcctggaaagaagagaccggtagaaccgtcacctcagcgttcccccgactcctccacgggcatcggcaagaaaggccagcagcccgctagaaagagactgaactttgggcagactggcgactcagagtcagtccccgaccctcaaccaatcggagaaccaccagcaggcccctctggtctgggatctggtacaatggctgcaggcggtggcgctccaatggcagacaataacgaaggcgccgacggagtgggtaatgcctcaggaaattggcattgcgattccacatggctgggcgacagagtcatcaccaccagcacccgaacctgggctttgcccacctacaacaaccacctctacaagcaaatctccagtcagtcagcaggtagcaccaacgacaacgtctacttcggctacagcaccccctgggggtattttgacttcaacagattccactgtcacttctcaccacgtgactggcagcggctcatcaacaacaactggggattccggcccaagaagctcaacttcaagctgttcaacatccaggtcaaggaggtcacaacgaatgacggcgtcacgaccatcgccaataaccttaccagcacggttcaggtcttttcggactcggaataccagctgccctacgtcctcggctccgcacaccagggctgcctgcctccgttcccggcggacgtcttcatgattccccagtacggctacctgactctgaacaatggcagccaatcggtgggtcgttcctctttctactgcctggaatatttcccttctcaaatgctgagaacgggcaacaacttcaccttcagctacaccttcgaggacgttcccttccacagcagctacgcacacagccagagcctggaccggctgatgaatcctcttatcgaccagtacctgtattacctggccagaacacagagcaacgcaggaggcacagctggcaatcgggaactgcagttttatcagggcgggcctaccaccatggccgaacaagccaaaaactggctgcctggaccttgcttccggcaacaaagagtctccaagacgctggatcaaaacaacaacagcaactttgcttggactggtgccaccaaataccatctaaatggaagaaattcattggttaatcccggtgtcgccatggcaacccacaaggacgacgaggaacgcttcttcccttcgagcggagtcctgatttttggaaaaactggagcagctaataagactacactggaaaatgtgttaatgacaaatgaagaggaaattcgtcctaccaacccggtagccaccgaggaatacgggactgttagcagcaacctgcaggcggctaacactgcagcccagacacaagttgtcaacaaccagggagccttacctggtatggtctggcagaaccgggacgtgtacctgcagggtcccatctgggccaagattcctcacacggacggcaactttcacccgtctccgctgatgggcggctttggactgaagcatccgcctcctcagatcctgatcaaaaacactcctgttcctgctaatcccccggaggtgtttacgcctgccaagtttgcttctttcatcacacagtacagcaccggccaggtcagcgtggagatcgagtgggagctgcagaaggagaacagcaagcgctggaacccagagattcagtatacctccaattttgacaaacagactggtgtggactttgccgttgacagccagggtgtttattctgagcctcgccccattggtactcgttacctcacccgtaatctgtaa

SEQ ID NO: 494 - protein, 737 aa, Adeno-associated virus; identical to SEQ ID NO: 453

SEQ ID NO: 495 - protein, 737 aa, Adeno-associated virus
MAADGYLPDWLEDNLSEGIREWWDLKPGAPKPKANQQKQDDGRGLVLPGYKYLGPFNGLDKGEPVNAADAAALEHDKAYDQQLKAGDNPYLRYNHADAEFQERLQEDTSFGGNLGRAVLQAKKRVLEPLGLVEEAAKTAPGKKRPVEPSPQRSPDSSTGIGKKGQQPARKRLNFGQTGDSESVPDPQPIGEPPAGPSGLGSGTMAAGGGAPMADNNEGADGVGNASGNWHCDSTWLGDRVITTSTRTWALPTYNNHLYKQISSQSAGSTNDNVYFGYSTPWGYFDFNRFHCHFSPRDWQRLINNNWGFRPKKLNFKLFNIQVKEVTTNDGVTTIANNLTSTVQVFSDSEYQLPYVLGSAHQGCLPPFPADVFMIPQYGYLTLNNGSQSVGRSSFYCLEYFPSQMLRTGNNFTFSYTFEDVPFHSSYAHSQSLDRLMNPLIDQYLYYLARTQSNAGGTAGNRELQFYQGGPTTMAEQAKNWLPGPCFRQQRVSKTLDQNNNSNFAWTGATKYHLNGRNSLVNPGVAMATHKDDEERFFPSSGVLIFGKTGAANKTTLENVLMTNEEEIRPTNPVATEEYGTVSSNLQAANTAAQTQVVNNQGALPGMVWQNRDVYLQGPIWAKIPHTDGNFHPSPLMGGFGLKHPPPQILIKNTPVPANPPEVFTPAKFASFITQYSTGQVSVEIEWELQKENSKRWNPEIQYTSNFDKQTGVDFAVDSQGVYSEPRPIGTRYLTRNL

SEQ ID NO: 496 - DNA, 2217 bp, Adeno-associated virus
atggctgccgatggttatcttccagattggctcgaggacaacctctctgagggcattcgcgagtggtgggacctgaaacctggagccccgaaacccaaagccaaccagcaaaagcaggacgacggccggggtctggtgcttcctggctacaagtacctcggacccttcaacggactcgacaagggggagcccgtcaacgcggcggacgcagcggccctcgagcacgacaaggcctacgaccagcagctcaaagcgggtgacaatccgtacctgcggtataatcacgccgacgccgagtttcaggagcgtctgcaagaagatacgtcttttgggggcaacctcgggcgagcagtcttccaggccaagaagcgggttctcgaacctctcggtctggttgaggaaggcgctaagacggctcctggaaagaagagaccggtagagccgtcaccacagcgttcccccgactcctccacgggcatcggcaagaaaggccagcagcccgccagaaagagactcaatttcggtcagactggcgactcagagtcagtccccgaccctcaacctatcggagaacctccagcagcgccctctagtgtgggatctggtacaatggctgcaggcggtggcgcaccaatggcagacaataacgaaggtgccgacggagtgggtagttcctcgggaaattggcattgcgattccacatggctgggcgacagagtcatcaccaccagcacccgaacctgggccctgcccacctacaacaaccacctctacaagcaaatctccaacgggacctcgggaggcagcaccaacgacaacacctactttggctacagcaccccctgggggtattttgactttaacagattccactgccacttctcaccacgtgactggcagcgactcatcaacaacaactggggattccggcccaagagactcagcttcaagctcttcaacatccaggtcaaagaggtcacgcagaatgaaggcaccaagaccatcgccaataacctcaccagcaccatccaggtgtttacggactcggaataccagctgccgtacgtcctcggctctgcccaccagggctgcctgcctccgttcccggcggacgtcttcatgattcctcagtacggctacctgactctcaacaacggtagtcaggccgtgggacgttcctccttctactgcctggagtacttcccctctcagatgctgagaacgggcaacaacttttccttcagctacactttcgaggacgtgcctttccacagcagctacgcgcacagccagagtttggacaggctgatgaatcctctcatcgaccagtacctgtactacctgtcaagaacccagtctacgggaggcacagcgggaacccagcagttgctgttttctcaggccgggcctagcaacatgtcggctcaggccagaaactggctgcctggaccctgctacagacagcagcgcgtctccacgacactgtcgcaaaacaacaacagcaactttgcctggactggtgccaccaagtatcatctgaacggcagagactctctggtgaatccgggcgtcgccatggcaaccaacaaggacgacgaggaccgcttcttcccacccagcggcatcctcatgtttggcaagcagggagctggaaaagacaacgtggactatagcaacgtgatgctaaccagcgaggaagaaatcaagaccaccaaccccgtggccacagaacagtatggcgtggtggctgataacctacagcagcaaaacaccgctcctattgtgggggccgtcaacagccagggagccttacctggcatggtctggcagaaccgggacgtgtacctgcagggtcctatttgggccaagattcctcacacagatggcaactttcacccgtctcctttaatgggcggctttggacttaaacatccgcctcctcagatcctcatcaaaaacactcctgttcctgcggatcctccaacagcgttcaaccaggccaagctgaattctttcatcacgcagtacagcaccggacaagtcagcgtggtgatcgagtgggagctgcagaaggagaacagcaagcgctggaacccagagattcagtatacttccaactactacaaatctacaaatgtggactttgctgttaatactgagggtgtttactctgagcttcgccccattggcactcgttacctcacccgtaatctgtaa

SEQ ID NO: 497 - protein, 738 aa, Adeno-associated virus
MAADGYLPDWLEDNLSEGIREWWDLKPGAPKPKANQQKQDDGRGLVLPGYKYLGPFNGLDKGEPVNAADAAALEHDKAYDQQLKAGDNPYLRYNHADAEFQERLQEDTSFGGNLGRAVFQAKKRVLEPLGLVEEGAKTAPGKKRPVEPSPQRSPDSSTGIGKKGQQPARKRLNFGQTGDSESVPDPQPIGEPPAAPSSVGSGTMAAGGGAPMADNNEGADGVGSSSGNWHCDSTWLGDRVITTSTRTWALPTYNNHLYKQISNGTSGGSTNDNTYFGYSTPWGYFDFNRFHCHFSPRDWQRLINNNWGFRPKRLSFKLFNIQVKEVTQNEGTKTIANNLTSTIQVFTDSEYQLPYVLGSAHQGCLPPFPADVFMIPQYGYLTLNNGSQAVGRSSFYCLEYFPSQMLRTGNNFSFSYTFEDVPFHSSYAHSQSLDRLMNPLIDQYLYYLSRTQSTGGTAGTQQLLFSQAGPSNMSAQARNWLPGPCYRQQRVSTTLSQNNNSNFAWTGATKYHLNGRDSLVNPGVAMATNKDDEDRFFPPSGILMFGKQGAGKDNVDYSNVMLTSEEEIKTTNPVATEQYGVVADNLQQQNTAPIVGAVNSQGALPGMVWQNRDVYLQGPIWAKIPHTDGNFHPSPLMGGFGLKHPPPQILIKNTPVPADPPTAFNQAKLNSFITQYSTGQVSVVIEWELQKENSKRWNPEIQYTSNYYKSTNVDFAVNTEGVYSELRPIGTRYLTRNL

SEQ ID NO: 498 - DNA, 2214 bp, Adeno-associated virus
atggctgctgacggttatcttccagattggctcgaggacaacctctctgagggcattcgcgagtggtgggacctgaaacctggagcccccaagcccaaggccaaccagcagaagcaggacgacggccggggtctggtgcttcctggctacaagtacctcggacccttcaacggactcgacaagggggagcccgtcaacgcggcggacgcagcggccctcgagcacgacaaggcctacgaccagcagctcaaagcgggtgacaatccgtacctgcggtataaccacgccgacgccgagtttcaggagcgtctgcaagaagatacgtcttttgggggcaacctcgggcgagcagtcttccaggccaagaagcgggttctcgaacctctcggtctggttgaggaagctgctaagacggctcctggaaagaagagaccggtagaaccgtcacctcagcgttcccccgactcctccacgggcatcggcaagaaaggccagcagcccgctagaaagagactgaactttgggcagactggcgactcagagtcagtccccgaccctcaaccaatcggagaaccaccagcaggcccctctggtctgggatctggtacaatggctgcaggcggtggcgccccaatggcagacaataacgaaggcgccgacggagtgggtaatgcctcaggaaattggcattgcgattccacatggctgggcgacagagtcatcaccaccagcacccgaacctgggctttgcccacctacaacaaccacctctacaagcaaatctccagtcagtcagcaggtagcaccaacgacaacgtctacttcggctacagcaccccctgggggtattttgacttcaacagattccactgtcacttctcaccacgtgactggcagcggctcatcaacaacaactggggattccggcccaagaagctcaacttcaagctgttcaacatccaggtcaaggaggtcacaacgaatgacggcgtcacgaccatcgccaataaccttaccagcacggttcaggtcttttcggactcggaataccagctgccctacgtcctcggctccgcacaccagggctgcctgcctccgttcccggcggacgtcttcatgattccccagtacggctacctgactctgaacaatggcagccaatcggtgggtcgttcctctttctactgcctggaatatttcccttctcaaatgctgagaacgggcaacaacttcaccatcagctacaccttcgaggacgttcccttccacagcagctacgcacacagccagagcctggaccggctgatgaatcctcttatcgaccagtacctgtattacctggccagaacacagagcaacgcaggaggcacagctggcaatcaggaactgcagttttatcagggcgggcctaccaccatggccgaacaagccaaaaactggctgcctggaccttgcttccggcaacaaagagtctccaagacgctggatcaaaacaacaacagcaactttgcttggactggtgccaccaaataccatctaaatggaagaaattcattggttaatcccggtgtcgccatggcaacccacaaggacgacgaggaacgcttcttcccttcgagcggagtcctgatttttggaaaaactggagcagctaataagactacactggaaaatgtgttaatgacaaatgaagaggaaattcgtcctaccaacccggtagccaccgaggaatacgggactgttagcagcaacctgcaggcggctaacactgcagcccagacacaagttgtcaacaaccagggagccttacctggtatggtctggcagaaccgggacgtgtacctgcagggtcccatctgggccaagattcctcacacagatggcaactttcacccgtctcctttaatgggcggctttggacttaaacatccgcctcctcagatcctcatcaaaaacactcctgttcctgcggatcctccaacagcgttcaaccaggccaagctgaattctttcatcacgcagtacagcaccggacaagtcagcgtggagatcgagtgggagctgcagaaggagaacagcaagcgctggaacccagagattcagtatacttccaactactacaaatctacaaatgtggactttgctgttaatactgagggtgtttactctgagcctcgccccattggcactcgttacctcacccgtaatctgtaa

SEQ ID NO: 499 - protein, 737 aa, Adeno-associated virus
MAADGYLPDWLEDNLSEGIREWWDLKPGAPKPKANQQKQDDGRGLVLPGYKYLGPFNGLDKGEPVNAADAAALEHDKAYDQQLKAGDNPYLRYNHADAEFQERLQEDTSFGGNLGRAVFQAKKRVLEPLGLVEEAAKTAPGKKRPVEPSPQRSPDSSTGIGKKGQQPARKRLNFGQTGDSESVPDPQPIGEPPAGPSGLGSGTMAAGGGAPMADNNEGADGVGNASGNWHCDSTWLGDRVITTSTRTWALPTYNNHLYKQISSQSAGSTNDNVYFGYSTPWGYFDFNRFHCHFSPRDWQRLINNNWGFRPKKLNFKLFNIQVKEVTTNDGVTTIANNLTSTVQVFSDSEYQLPYVLGSAHQGCLPPFPADVFMIPQYGYLTLNNGSQSVGRSSFYCLEYFPSQMLRTGNNFTISYTFEDVPFHSSYAHSQSLDRLMNPLIDQYLYYLARTQSNAGGTAGNQELQFYQGGPTTMAEQAKNWLPGPCFRQQRVSKTLDQNNNSNFAWTGATKYHLNGRNSLVNPGVAMATHKDDEERFFPSSGVLIFGKTGAANKTTLENVLMTNEEEIRPTNPVATEEYGTVSSNLQAANTAAQTQVVNNQGALPGMVWQNRDVYLQGPIWAKIPHTDGNFHPSPLMGGFGLKHPPPQILIKNTPVPADPPTAFNQAKLNSFITQYSTGQVSVEIEWELQKENSKRWNPEIQYTSNYYKSTNVDFAVNTEGVYSEPRPIGTRYLTRNL

SEQ ID NO: 500 - DNA, 2217 bp, Adeno-associated virus
atggctgccgatggttatcttccagattggctcgaggacaacctctctgagggcattcgcgagtggtgggacctgaaacctggagccccgaaacccaaagccaaccagcaaaagcaggacgacggccggggtctggtgcttcctggctacaagtacctcggacccttcaacggactcgacaagggggagcccgtcaacgcggcggacgcagcggccctcgagcacgacaaggcctacgaccagcagctcaaagcgggtgacaatccgtacctgcggtataatcacgccgacgccgagtttcaggagcgtctgcaagaagatacgtcttttgggggcaacctcgggcgagcagtcttccaggccaagaagcgggttctcgaacctctcggtctggttgaggaaggcgctaagacggctcctggaaagaagagaccggtagagccgtcaccacagcgttcccccgactcctccacgggcatcggcaagaaaggccagcagcccgccagaaagagactcaatttcggtcagactggcgactcagagtcagtccccgaccctcaacctatcggagaacctccagcagcgccctctagtgtgggatctggtacaatggctgcaggcggtggcgcaccaatggcagacaataacgaaggtgccgacggagtgggtagttcctcgggaaattggcattgcgattccacatggctgggcgacagagtcatcaccaccagcacccgaacctgggccctgcccgcctacaacaaccacctctacaagcaaatctccaacgggacctcgggaggcagcaccaacgacaacacctactttggctacagcaccccctgggggtattttgactttaacagattccactgccacttctcaccacgtgactggcagcgactcatcaacaacaactggggattccggcccaagagactcagcttcaagctcttcaacatccaggtcaaagaggtcacgcagaatgaaggcaccaagaccatcgccaataacctcaccagcaccatccaggtgtttacggactcggaataccagctgccgtacgtcctcggctctgcccaccagggctgcctgcctccgttcccggcggatgtcttcatgattcctcagtacggctacctgactctcaacaacggtagtcaggccgtgggacgttcctccttctactgcctggagtacttcccctctcagatgctgagaacgggcaacaacttttccttcagctacactttcgaggacgtgcctttccacagcagctacgcgcacagccagagtttggacaggctgatgaatcctctcatcgaccagtacctgtactacctgtcaagaacccagtctacgggaggcacagcgggaacccagcagttgctgttttctcaggccgggcctagcaacatgtcggctcaggccagaaactggctgcctggaccctgctacagacagcagcgcgtctccacgacactgtcgcaaaacaacaacagcaactttgcctggactggtgccaccaagtatcatctgagcggcagagactctctggtgaatccgggcgtcgccatggcaaccaacaaggacgacgaggaccgcttcttcccatccagcggcatcctcatgtttggcaagcagggagctggaaaagacaacgtggactatagcaacgtgatgctaaccagcgaggaagaaatcaagaccaccaaccccgtggccacagaacagtatggcgtggtggctgataacctacagcagcaaaacaccgctcctattgtgggggccgtcaacagccagggagccttacctggcatggtctggcagaaccgggacgtgtacctgcagggtcctatttgggccaagattcctcacacagatggcaactttcacccgtctcctttaatgggcggctttggacttaaacatccgcctcctcagatcctcatcaaaaacactcctgttcctgcggatcctccaacagcgttcaaccaggccaagctgaattcttccatcacgcagtacagcaccggacaagtcagcgtggagatcgagtgggagctgcagaaggagaacagcaagcgctggaacccagagattcagtatacttccaactactacaaatctacaaatgtggactttgctgttaatactgagggtgtttactctgagcctcgccccattggcactcgttacctcacccgtaatttgtaa

SEQ ID NO: 501 - protein, 738 aa, Adeno-associated virus
MAADGYLPDWLEDNLSEGIREWWDLKPGAPKPKANQQKQDDGRGLVLPGYKYLGPFNGLDKGEPVNAADAAALEHDKAYDQQLKAGDNPYLRYNHADAEFQERLQEDTSFGGNLGRAVFQAKKRVLEPLGLVEEGAKTAPGKKRPVEPSPQRSPDSSTGIGKKGQQPARKRLNFGQTGDSESVPDPQPIGEPPAAPSSVGSGTMAAGGGAPMADNNEGADGVGSSSGNWHCDSTWLGDRVITTSTRTWALPAYNNHLYKQISNGTSGGSTNDNTYFGYSTPWGYFDFNRFHCHFSPRDWQRLINNNWGFRPKRLSFKLFNIQVKEVTQNEGTKTIANNLTSTIQVFTDSEYQLPYVLGSAHQGCLPPFPADVFMIPQYGYLTLNNGSQAVGRSSFYCLEYFPSQMLRTGNNFSFSYTFEDVPFHSSYAHSQSLDRLMNPLIDQYLYYLSRTQSTGGTAGTQQLLFSQAGPSNMSAQARNWLPGPCYRQQRVSTTLSQNNNSNFAWTGATKYHLSGRDSLVNPGVAMATNKDDEDRFFPSSGILMFGKQGAGKDNVDYSNVMLTSEEEIKTTNPVATEQYGVVADNLQQQNTAPIVGAVNSQGALPGMVWQNRDVYLQGPIWAKIPHTDGNFHPSPLMGGFGLKHPPPQILIKNTPVPADPPTAFNQAKLNSSITQYSTGQVSVEIEWELQKENSKRWNPEIQYTSNYYKSTNVDFAVNTEGVYSEPRPIGTRYLTRNL

SEQ ID NO: 502 - protein, 736 aa, Adeno-associated virus; identical to SEQ ID NO: 2

SEQ ID NO: 503 - DNA, 2217 bp, Adeno-associated virus
atggctgctgacggttatcttccagattggctcgaggacaacctctctgagggcattcgcgagtggtgggacctgaaacctggagcccccaagcccaaggccaaccagcagaagcaggacgacggccggggtctggtgcttcctggctacaagtacctcggacccttcaacggactcgacaagggggagcccgtcaacgcggcggacgcagcggccctcgagcacgacaaggcctacgaccagcagctcaaagcgggtgacaatccgtacctgcggtataaccacgccgacgccgagtttcaggagcgtctgcaagaagatacgtcttttgggggcaacctcgggcgagcagtcttccaggccaagaagcgggttctcgaacctctcggtctggttgaggaagctgctaagacggctcctggaaagaagagaccggtagaaccgtcacctcagcgttcccccgactcctccacgggcatcggcaagaaaggccagcagcccgctaaaaagagactgaactttggtcagactggcgactcagagtcagtccccgaccctcaaccaatcggagaaccaccagcaggcccctctggtctgggatctggtacaatggctgcaggcggtggcgctccaatggcagacaataacgaaggcgccgacggagtgggtagttcctcaggaaattggcattgcgattccacatggctgggcgacagagtcatcaccaccagcacccgaacctgggccctgcccacctacaacaaccacctctacaagcaaatatccaatgggacatcgggaggaagcaccaacgacaacacctacttcggctacagcaccccctgggggtattttgacttcaacagattccactgccacttctcaccacgtgactggcagcgactcatcaacaacaactggggattccggccaaaaagactcagcttcaagctcttcaacatccaggtcaaggaggtcacgcagaatgaaggcaccaagaccatcgccaataaccttaccagcacgattcaggtatttacggactcggaataccagctgccgtacgtcctcggctccgcgcaccagggctgcctgcctccgttcccggcggacgtcttcatgattccccagtacggctaccttacactgaacaatggaagtcaagccgtaggccgttcctccttctactgcctggaatattttccatctcaaatgctgcgaactggaaacaattttgaattcagctacaccttcgaggacgtgcctttccacagcagctacgcacacagccagagcttggaccgactgatgaatcctctcatcgaccagtacctgtactacttatccagaactcagtccacaggaggaactcaaggtacccagcaattgttattttctcaagctgggcctgcaaacatgtcggctcaggctaagaactggctacctggaccttgctaccggcagcagcgagtctctacgacactgtcgcaaaacaacaacagcaactttgcttggactggtgccaccaaatatcacctgaacggaagagactctttggtaaatcccggtgtcgccatggcaacccacaaggacgacgaggaacgcttcttcccgtcgagtggagtcctgatgtttggaaaacagggtgctggaagagacaatgtggactacagcagcgttatgctaaccagcgaagaagaaattaaaaccactaaccctgtagccacagaacaatacggtgtggtggctgacaacttgcagcaaaccaatacagggcctattgtgggaaatgtcaacagccaaggagccttacctggcatggtctggcagaaccgagacgtgtacctgcagggtcccatctgggccaagattcctcacacggacggcaacttccacccttcaccgctaatgggaggatttggactgaagcacccacctcctcagatcctgatcaagaacacgccggtacctgcggatcctccaacaacgttcagccaggcgaaattggcttccttcattacgcagtacagcaccggacaggtcagcgtggaaatcgagtgggagctgcagaaggagaacagcaaacgctggaacccagagattcagtacacttcaaactactacaaatctacaaatgtggactttgctgtcaatacagagggaacttattctgagcctcgccccattggtactcgttacctcacccgtaatctgtaa

SEQ ID NO: 504 - protein, 738 aa, Adeno-associated virus
MAADGYLPDWLEDNLSEGIREWWDLKPGAPKPKANQQKQDDGRGLVLPGYKYLGPFNGLDKGEPVNAADAAALEHDKAYDQQLKAGDNPYLRYNHADAEFQERLQEDTSFGGNLGRAVFQAKKRVLEPLGLVEEGAKTAPGKKRPVEPSPQRSPDSSTGIGKKGQQPARKRLNFGQTGDSESVPDPQPLGEPPAAPSSVGSGTMAAGGGAPMADNNEGADGVGSSSGNWHCDSTWLGDRVITTSTRTWALPTYNNHLYKQISNGTSGGSTNDNTYFGYSTPWGYFDFNRFHCHFSPRDWQRLINNNWGFRPKRLSFKLFNIQVKEVTQNEGTKTIANNLTSTIQVFTDSEYQLPYVLGSAHQGCLPPFPADVFMIPQYGYLTLNNGSQAVGRSSFYCLEYFPSQMLRTGNNFSFSYTFEDVPFHSSYAHSQSLDRLMNPLIDQYLYYLSRTQSTGGTAGTQQLLFSQAGPSNMSAQARNWLPGPCYRQQRVSTTLSQNNNSNFAWTGATKYHLNGRDSLVNPGVAMATNKDDEDRFFPSSGILMFGKQGAGKDNVDYSNVMLTSEEEIKTTNPVATEQYGVVADNLQRQNTAPIVGAVNSQGALPGMVWQNRDVYLQGPIWAKIPHTDGNFHPSPLMGGFGLKHPPPQILIKNTPVPADPPTAFNQAKLNSFITQYSTGQVSVEIEWELQKENSKRWNPEIQYTSNYYKSTNVDFAVNTEGVYSEPRPIGTRYLTRNL

SEQ ID NO: 505 - protein, 736 aa, Adeno-associated virus
MAADGYLPDWLEDNLSEGIREWLNLKPGAPQPKANQQKQDNARGLVLPGYKYLGPFNGLDKGDPVNEADAAALEHDKAYGQQLKAGDNPYLKYNHADAEFQERLQKDTSFGGNLGKAVFQAKKRILEPLGLVETPAKTAPGKKRPVDPSPQRSPDSSSGIGKKSPHPARKRLNFGQTGEAESVPDPQPIGEPPSDPSSVGSGTMAAGGGAPMADNNEGADGVGNSSGNWHCDSTWLGDRVITTSTRTWALPTYNNHLYKQISSQSGATNDNHYFGYSTPWGYFDFNRFHCHFSPRDWQRLINNNWGFRPKRLSFKLFNIQVKEVTQNDGTTTIANNLTSTVQVFTDSEYQLPYVLGSAHQGCLPPFPADVFMIPQYGYLTLNNGSQAVGRSSFYCLEYFPSQMLRTGNNFQFSYTFEDVPFHSSYAHSQSLDRLMNPLIDQYLYYLSKTQGTNATVQGAKLQFSQAGPSNMRDQARNWLPGPCYRQQRVSKTANDNNNSEYAWTGATKYHLNGRDSLVNPGPAMASHKDDEEKFFPMNGTLVFGKNGAGNSNVDIENVMITDEEEIRTTNPVATEQYGVVSDNLQSSNTRPITGDVDSQGVLPGMVWQDRDVYLQGPIWAKIPHTDGHFHPSPLMGGFGLKHPPPQILIKNTPVPANPATTFTPGKFASFITQYSTGQVSVQIEWELQKENSKRWNPEIQYTSNYNKSVNVDFTVDTNGVYSEPRPIGTRYLTRNL

SEQ ID NO: 506 - protein, 736 aa, Adeno-associated virus; identical to SEQ ID NO: 81

SEQ ID NO: 507 - protein, 736 aa, Adeno-associated virus
MAADGYLPDWLEDNLSEGIREWWDLKPGAPKPKANQQKQDDGRGLVLPGYKYLGPFNGLDKGEPVNAADAAALEHDKAYDQQLKAGDNPYLRYNHADAEFQERLQEDTSFGGNLGRAVFQAKKRVLEPLGLVEEGAKTAPGKKRPVEQSPQEPDSSSGIGKTGQQPAKKRLNFGQTGDSESVPDPQPLGEPPAAPSGLGPNTMASGGGAPMADNNEGADGVGNSSGNWHCDSTWLGDRVITTSTRTWALPTYNNHLYKQISNGTSGGSTNDNTYFGYSTPWGYFDFNRFHCHFSPRDWQRLINNNWGFRPKRLNFKLFNIQVKEVTTNEGTKTIANNLTSTVQVFTDSEYQLPYVLGSAHQGCLPPFPADVFMVPQYGYLTLNNGSQALGRSSFYCLEYFPSQMLRTGNNFQFSYTFEDVPFHSSYAHSQSLDRLMNPLIDQYLYYLVRTQTTGTGGTQTLAFSQAGPSSMANQARNWVPGPCYRQQRVSTTTNQNNNSNFAWTGAAKFKLNGRDSLMNPGVAMASHKDDEDRFFPSSGVLIFGKQGAGNDGVDYSQVLITDEEEIKATNPVATEEYGAVAINNQAANTQAQTGLVHNQGVIPGMVWQNRDVYLQGPIWAKIPHTDGNFHPSPLMGGFGLKHPPPQILIKNTPVPADPPLTFNQAKLNSFITQYSTGQVSVEIEWELQKENSKRWNPEIQYTSNYYKSTNVDFAVNTEGVYSEPRPIGTRYLTRNL

SEQ ID NO: 508 - protein, 736 aa, Artificial Sequence; identical to SEQ ID NO: 507
  Description of Artificial Sequence: Synthetic polypeptide

SEQ ID NO: 509 - protein, 736 aa, Artificial Sequence
  Description of Artificial Sequence: Synthetic polypeptide
MAADGYLPDWLEDNLSEGIREWWDLKPGAPKPKANQQKQDDGRGLVLPGYKYLGPFNGLDKGEPVNAADAAALEHDKAYDQQLKAGDNPYLRYNHADAEFQERLQEDTSFGGNLGRAVFQAKKRVLEPLGLVEEGAKTAPGKKRPVEQSPQEPDSSSGIGKTGQQPAKKRLNFGQTGDSESVPDPQPLGEPPAAPSGLGPNTMASGGGAPMADNNEGADGVGNSSGNWHCDSTWLGDRVITTSTRTWALPTYNNHLYKQISNGTSGGSTNDNTYFGYSTPWGYFDFNRFHCHFSPRDWQRLINNNWGFRPKRLNFKLFNIQVKEVTTNEGTKTIANNLTSTVQVFTDSEYQLPYVLGSAHQGCLPPFPADVFMVPQYGYLTLNNGSQALGRSSFYCLEYFPSQMLRTGNNFQFSYTFEDVPFHSSYAHSQSLDRLMNPLIDQYLYYLVRTQTTGTGGTQTLAFSQAGPSSMANQARNWVPGPCYRQQRVSTTTNQNNNSNFAWTGAAKFKLNGRDSLMNPGVAMASHKDDEDRFFPSSGVLIFGKQGAGNDGVDYSQVLITDEEEIKATNPVATEEYGAVAINNQRANTQAQTGLVHNQGVIPGMVWQNRDVYLQGPIWAKIPHTDGNFHPSPLMGGFGLKHPPPQILIKNTPVPADPPLTFNQAKLNSFITQYSTGQVSVEIEWELQKENSKRWNPEIQYTSNYYKSTNVDFAVNTEGVYSEPRPIGTRYLTRNL

SEQ ID NO: 510 - protein, 736 aa, Artificial Sequence
  Description of Artificial Sequence: Synthetic polypeptide
MAADGYLPDWLEDNLSEGIREWWDLKPGAPKPKANQQKQDDGRGLVLPGYKYLGPFNGLDKGEPVNAADAAALEHDKAYDQQLKAGDNPYLRYNHADAEFQERLQEDTSFGGNLGRAVFQAKKRVLEPLGLVEEGAKTAPGKKRPVEQSPQEPDSSSGIGKTGQQPAKKRLNFGQTGDSESVPDPQPLGEPPAAPSGLGPNTMASGGGAPMADNNEGADGVGNSSGNWHCDSTWLGDRVITTSTRTWALPTYNNHLYKQISNGTSGGSTNDNTYFGYSTPWGYFDFNRFHCHFSPRDWQRLINNNWGFRPKRLNFKLFNIQVKEVTTNEGTKTIANNLTSTVQVFTDSEYQLPYVLGSAHQGCLPPFPADVFMVPQYGYLTLNNGSQALGRSSFYCLEYFPSQMLRTGNNFQFSYTFEDVPFHSSYAHSQSLDRLMNPLIDQYLYYLVRTQTTGTGGTQTLAFSQAGPSSMANQARNWVPGPCYRQQRVSTTTNQNNNSNFAWTGAAKFKLNGRDSLMNPGVAMASHKDDEDAFFPSSGVLIFGKQGAGNDGVDYSQVLITDEEEIKATNPVATEEYGAVAINNQAANTQAQTGLVHNQGVIPGMVWQNRDVYLQGPIWAKIPHTDGNFHPSPLMGGFGLKHPPPQILIKNTPVPADPPLTFNQAKLNSFITQYSTGQVSVEIEWELQKENSKRWNPEIQYTSNYYKSTNVDFAVNTEGVYSEPRPIGTRYLTRNL

SEQ ID NO: 511 - DNA, 1803 bp, Bovine adeno-associated virus
acggcgcctgcggcaaaaaagaggcctctagagcagagtcctcaagagccagactcctcgagcggagttggcaagaaaggcaaacagcctgccagaaagagactcaactttgacgacgaacctggagccggagacgggcctcccccagaaggaccatcttccggagctatgtctactgagactgaaatgcgtgcagcagctggcggaaatggtggcgatgcgggacaaggtgccgagggagtgggtaatgcctccggtgattggcattgcgattccacttggtcagagagccacgtcaccaccacctcaacccgcacctgggtcctgccgacctacaacaaccacctgtacctgcggctcggctcgagcaacgccagcgacaccttcaacggattctccaccccctggggatactttgactttaaccgcttccactgccacttctcgccaagagactggcaaaggctcatcaacaaccactggggactgcgccccaaaagcatgcaagtccgcatcttcaacatccaagttaaggaggtcacgacgtctaacggggagacgaccgtatccaacaacctcaccagcacggtccagatctttgcggacagcacgtacgagctcccgtacgtgatggatgcaggtcaggagggcagcttgcctcctttccccaacgacgtgttcatggtgcctcagtacgggtactgcggactggtaaccggaggcagctctcaaaaccagacagacagaaatgccttctactgtctggagtactttcccagccagatgctgagaaccggaaacaactttgagatggtgtacaagtttgaaaacgtgcccttccactccatgtacgctcacagccagagcctggataggctgatgaacccgctgctggaccagtacctgtgggagctccagtctaccacctctggaggaactctcaaccagggcaattcagccaccaactttgccaagctgaccaaaacaaacttttctggctaccgcaaaaactggctcccggggcccatgatgaagcagcagagattctccaagactgccagtcaaaactacaagattccccagggaagaaacaacagtctgctccattatgagaccagaactaccctcgacggaagatggagcaattttgccccgggaacggccatggcaaccgcagccaacgacgccaccgacttctctcaggcccagctcatctttgcggggcccaacatcaccggcaacaccaccacagatgccaataacctgatgttcacttcagaagatgaacttagggccaccaacccccgggacactgacctgtttggccacctggcaaccaaccagcaaaacgccaccaccgttcctaccgtagacgacgtggacggagtcggcgtgtacccgggaatggtgtggcaggacagagacatttactaccaagggcccatttgggccaaaattccacacacggatggacactttcacccgtctcctctcattggcggatttggactgaaaagcccgcctccacaaatattcatcaaaaacactcctgtacccgccaatcccgcaacgaccttctctccggccagaatcaacagcttcatcacccagtacagcaccggacaggtggctgtcaaaatagaatgggaaatccagaaggagcggtccaagagatggaacccagaggtccagttcacgtccaactacggagcacaggactcgcttctctgggctcccgacaacgccggagcctacaaagagcccagggccattggatcccgatacctcaccaaccacctctag

SEQ ID NO: 512 - DNA, 1617 bp, Bovine adeno-associated virus
atgcgtgcagcagctggcggaaatggtggcgatgcgggacaaggtgccgagggagtgggtaatgcctccggtgattggcattgcgattccacttggtcagagagccacgtcaccaccacctcaacccgcacctgggtcctgccgacctacaacaaccacctgtacctgcggctcggctcgagcaacgccagcgacaccttcaacggattctccaccccctggggatactttgactttaaccgcttccactgccacttctcgccaagagactggcaaaggctcatcaacaaccactggggactgcgccccaaaagcatgcaagtccgcatcttcaacatccaagttaaggaggtcacgacgtctaacggggagacgaccgtatccaacaacctcaccagcacggtccagatctttgcggacagcacgtacgagctcccgtacgtgatggatgcaggtcaggagggcagcttgcctcctttccccaacgacgtgttcatggtgcctcagtacgggtactgcggactggtaaccggaggcagctctcaaaaccagacagacagaaatgccttctactgtctggagtactttcccagccagatgctgagaaccggaaacaactttgagatggtgtacaagtttgaaaacgtgcccttccactccatgtacgctcacagccagagcctggataggctgatgaacccgctgctggaccagtacctgtgggagctccagtctaccacctctggaggaactctcaaccagggcaattcagccaccaactttgccaagctgaccaaaacaaacttttctggctaccgcaaaaactggctcccggggcccatgatgaagcagcagagattctccaagactgccagtcaaaactacaagattccccagggaagaaacaacagtctgctccattatgagaccagaactaccctcgacggaagatggagcaattttgccccgggaacggccatggcaaccgcagccaacgacgccaccgacttctctcaggcccagctcatctttgcggggcccaacatcaccggcaacaccaccacagatgccaataacctgatgttcacttcagaagatgaacttagggccaccaacccccgggacactgacctgtttggccacctggcaaccaaccagcaaaacgccaccaccgttcctaccgtagacgacgtggacggagtcggcgtgtacccgggaatggtgtggcaggacagagacatttactaccaagggcccatttgggccaaaattccacacacggatggacactttcacccgtctcctctcattggcggatttggactgaaaagcccgcctccacaaatattcatcaaaaacactcctgtacccgccaatcccgcaacgaccttctctccggccagaatcaacagcttcatcacccagtacagcaccggacaggtggctgtcaaaatagaatgggaaatccagaaggagcggtccaagagatggaacccagaggtccagttcacgtccaactacggagcacaggactcgcttctctgggctcccgacaacgccggagcctacaaagagcccagggccattggatcccgatacctcaccaaccacctctag

SEQ ID NO: 513 - DNA, 1173 bp, Bovine adeno-associated virus
atggcgctggtaagctggctggtggaacatggcatcacttccgagaagcagtggattcaggagaatcaggagagctacctgtccttcaactccacgggaaactctcggagccagattaaagccgcgcttgacaacgcgtcaaaaattatgagtctgaccaaatctgcctcagactatctcgtgggacagactgttccagaggacatttctgaaaacagaatctggcagatttttgatctcaacggctacgacccggcatacgcgggctctgttctctacggctggtgcactcgcgcctttggaaagaggaacaccgtctggctgtatggacccgcgaccaccggaaagaccaacatcgcggaagccatctctcacaccgtgcccttttatggctgtgtgaactggactaatgagaactttccctttaatgactgtgtggaaaaaatgttgatctggtgggaggagggaaagatgaccagcaaggtggtggaacccgccaaggccatcttgggggggtctagagtacgagtggatcaaaaatgtaaatcctctgtacaagtagactctaccccggtgattatcacctccaatactaacatgtgtgtggtggtggatgggaactccacgacctttgaacaccagcagccgctggaagaccgcatgttcagatttgaactcatgcggcggctcccgccagattttggcaagattaccaagcaggaagtcaaagacttttttgcttgggcaaaggtcaaccaggtgccggtgactcacgagtttatggttcccaagaaagtggcgggaactgagagggcggagacttctagaaaacgcccactggatgacgtcaccaataccaactataaaagtccggagaagcgggcccggctctcagttgttcctgagacgcctcgcagttcagacgtgcctgtagagcccgctcctctgcgacctctcaactggtcttccaggtatgaatgcagatgtgactatcatgctaaatttgactctgtaacgggggaatgtgacgagtgtgaatatttgaatcggggcaaaaatggctgtatctttcataatgctacacattgtcaaatttgtcacgctgttcctccatgggaaaaggaaaatgtgtcagattttaatgattttgatgactgtaataaagagcagtaa

SEQ ID NO: 514 - DNA, 1833 bp, Bovine adeno-associated virus
atggctaccttctatgaagtcattgttcgcgttccatttgatgtggaagagcacctgcctggaatttctgacaactttgtagactgggtaactggtcaaatttgggagctgcctcccgagtcagatttgaatttgactctgattgagcagcctcagctgacggtggctgacagaattcgccgcgtgttcctgtacgagtggaacaaattttccaagcaggagagcaaattctttgtgcagtttgaaaagggatctgaatattttcatctgcacacgctcgtggagacctccggcatctcttctatggtccttggccgctacgtgagtcagattcgcgcccagctggtgaaggtggtgttccagaacattgagccgcggattaacgactgggtcgccatcaccaaggtaaagaagggcggagccaataaggtggtggattctgggtatattcccgcctacctgctgccgaaggtccaaccagagcttcagtgggcgtggactaacctcgaagagtataaattggccgccctcaatctggaggagcgcaaacggctcgtcgctcagtttcagcttgagtcctcgcagcgctcgcaagaggcatcttcccagagggacgtttcggctgacccggtcatcaagagcaagacttcccagaaatacatggcgctggtaagctggctggtggaacatggcatcacttccgagaagcagtggattcaggagaatcaggagagctacctgtccttcaactccacgggaaactctcggagccagattaaagccgcgcttgacaacgcgtcaaaaattatgagtctgaccaaatctgcctcagactatctcgtgggacagactgttccagaggacatttctgaaaacagaatctggcagatttttgatctcaacggctacgacccggcatacgcgggctctgttctctacggctggtgcactcgcgcctttggaaagaggaacaccgtctggctgtatggacccgcgaccaccggaaagaccaacatcgcggaagccatctctcacaccgtgcccttttatggctgtgtgaactggactaatgagaactttccctttaatgactgtgtggaaaaaatgttgatctggtgggaggagggaaagatgaccagcaaggtggtggaacccgccaaggccatcttgggggggtctagagtacgagtggatcaaaaatgtaaatcctctgtacaagtagactctaccccggtgattatcacctccaatactaacatgtgtgtggtggtggatgggaactccacgacctttgaacaccagcagccgctggaagaccgcatgttcagatttgaactcatgcggcggctcccgccagattttggcaagattaccaagcaggaagtcaaagacttttttgcttgggcaaaggtcaaccaggtgccggtgactcacgagtttatggttcccaagaaagtggcgggaactgagagggcggagacttctagaaaacgcccactggatgacgtcaccaataccaactataaaagtccggagaagcgggcccggctctcagttgttcctgagacgcctcgcagttcagacgtgcctgtagagcccgctcctctgcgacctctcaactggtcttccaggtatgaatgcagatgtgactatcatgctaaatttgactctgtaacgggggaatgtgacgagtgtgaatatttgaatcggggcaaaaatggctgtatctttcataatgctacacattgtcaaatttgtcacgctgttcctccatgggaaaaggaaaatgtgtcagattttaatgattttgatgactgtaataaagagcagtaa

SEQ ID NO: 515 - DNA, 2211 bp, Bovine adeno-associated virus
atgtcttttgttgaccaccctccagattggttggaatcgatcggcgacggctttcgtgaatttctcggccttgaggcgggtcccccgaaacccaaggccaatcaacagaagcaagataacgctcgaggtcttgtgcttcctgggtacaagtatcttggtcctgggaacggccttgataagggcgatcctgtcaattttgctgacgaggttgcccgagagcacgacctctcctaccagaaacagcttgaggcgggcgataacccttacctcaagtacaaccacgcggacgcagagtttcaggagaaactcgcttctgacacttcttttgggggaaaccttgggaaggctgttttccaggctaaaaagaggattctcgaacctcttggcctggttgagacgccggataaaacggcgcctgcggcaaaaaagaggcctctagagcagagtcctcaagagccagactcctcgagcggagttggcaagaaaggcaaacagcctgccagaaagagactcaactttgacgacgaacctggagccggagacgggcctcccccagaaggaccatcttccggagctatgtctactgagactgaaatgcgtgcagcagctggcggaaatggtggcgatgcgggacaaggtgccgagggagtgggtaatgcctccggtgattggcattgcgattccacttggtcagagagccacgtcaccaccacctcaacccgcacctgggtcctgccgacctacaacaaccacctgtacctgcggctcggctcgagcaacgccagcgacaccttcaacggattctccaccccctggggatactttgactttaaccgcttccactgccacttctcgccaagagactggcaaaggctcatcaacaaccactggggactgcgccccaaaagcatgcaagtccgcatcttcaacatccaagttaaggaggtcacgacgtctaacggggagacgaccgtatccaacaacctcaccagcacggtccagatctttgcggacagcacgtacgagctcccgtacgtgatggatgcaggtcaggagggcagcttgcctcctttccccaacgacgtgttcatggtgcctcagtacgggtactgcggactggtaaccggaggcagctctcaaaaccagacagacagaaatgccttctactgtctggagtactttcccagccagatgctgagaaccggaaacaactttgagatggtgtacaagtttgaaaacgtgcccttccactccatgtacgctcacagccagagcctggataggctgatgaacccgctgctggaccagtacctgtgggagctccagtctaccacctctggaggaactctcaaccagggcaattcagccaccaactttgccaagctgaccaaaacaaacttttctggctaccgcaaaaactggctcccggggcccatgatgaagcagcagagattctccaagactgccagtcaaaactacaagattccccagggaagaaacaacagtctgctccattatgagaccagaactaccctcgacggaagatggagcaattttgccccgggaacggccatggcaaccgcagccaacgacgccaccgacttctctcaggcccagctcatctttgcggggcccaacatcaccggcaacaccaccacagatgccaataacctgatgttcacttcagaagatgaacttagggccaccaacccccgggacactgacctgtttggccacctggcaaccaaccagcaaaacgccaccaccgttcctaccgtagacgacgtggacggagtcggcgtgtacccgggaatggtgtggcaggacagagacatttactaccaagggcccatttgggccaaaattccacacacggatggacactttcacccgtctcctctcattggcggatttggactgaaaagcccgcctccacaaatattcatcaaaaacactcctgtacccgccaatcccgcaacgaccttctctccggccagaatcaacagcttcatcacccagtacagcaccggacaggtggctgtcaaaatagaatgggaaatccagaaggagcggtccaagagatggaacccagaggtccagttcacgtccaactacggagcacaggactcgcttctctgggctcccgacaacgccggagcctacaaagagcccagggccattggatcccgatacctcaccaaccacctctag

SEQ ID NO: 516 - DNA, 4694 bp, Bovine adeno-associated virus
gtggcactcccccccctgtcgcgttcgctcgttcgctggctcgattgggggggtggcagctcaaagagctgccagacgacggccctctgggccgtcgcccccccaatcgagccagcgaacgagcgaacgcgacaggggggggagtgccacactctctagcaagggggttttgtaggtggtgatgtcattgttgatgtcattatagttgtcacgcgatagttaatgattaacagtcatgtgatgtgtgttatccaataggatgaaagcgcgcgaatgagatctcgcgagacttccggggtataaaaggggtgagtgaacgagcccgccgccattctctgctctggactgctagaggaccctcgctgccatggctaccttctatgaagtcattgttcgcgttccatttgatgtggaagagcacctgcctggaatttctgacaactttgtagactgggtaactggtcaaatttgggagctgcctcccgagtcagatttgaatttgactctgattgagcagcctcagctgacggtggctgacagaattcgccgcgtgttcctgtacgagtggaacaaattttccaagcaggagagcaaattctttgtgcagtttgaaaagggatctgaatattttcatctgcacacgctcgtggagacctccggcatctcttctatggtccttggccgctacgtgagtcagattcgcgcccagctggtgaaggtggtgttccagaacattgagccgcggattaacgactgggtcgccatcaccaaggtaaagaagggcggagccaataaggtggtggattctgggtatattcccgcctacctgctgccgaaggtccaaccagagcttcagtgggcgtggactaacctcgaagagtataaattggccgccctcaatctggaggagcgcaaacggctcgtcgctcagtttcagcttgagtcctcgcagcgctcgcaagaggcatcttcccagagggacgtttcggctgacccggtcatcaagagcaagacttcccagaaatacatggcgctggtaagctggctggtggaacatggcatcacttccgagaagcagtggattcaggagaatcaggagagctacctgtccttcaactccacgggaaactctcggagccagattaaagccgcgcttgacaacgcgtcaaaaattatgagtctgaccaaatctgcctcagactatctcgtgggacagactgttccagaggacatttctgaaaacagaatctggcagatttttgatctcaacggctacgacccggcatacgcgggctctgttctctacggctggtgcactcgcgcctttggaaagaggaacaccgtctggctgtatggacccgcgaccaccggaaagaccaacatcgcggaagccatctctcacaccgtgcccttttatggctgtgtgaactggactaatgagaactttccctttaatgactgtgtggaaaaaatgttgatctggtgggaggagggaaagatgaccagcaaggtggtggaacccgccaaggccatcttgggggggtctagagtacgagtggatcaaaaatgtaaatcctctgtacaagtagactctaccccggtgattatcacctccaatactaacatgtgtgtggtggtggatgggaactccacgacctttgaacaccagcagccgctggaagaccgcatgttcagatttgaactcatgcggcggctcccgccagattttggcaagattaccaagcaggaagtcaaagacttttttgcttgggcaaaggtcaaccaggtgccggtgactcacgagtttatggttcccaagaaagtggcgggaactgagagggcggagacttctagaaaacgcccactggatgacgtcaccaataccaactataaaagtccggagaagcgggcccggctctcagttgttcctgagacgcctcgcagttcagacgtgcctgtagagcccgctcctctgcgacctctcaactggtcttccaggtatgaatgcagatgtgactatcatgctaaatttgactctgtaacgggggaatgtgacgagtgtgaatatttgaatcggggcaaaaatggctgtatctttcataatgctacacattgtcaaatttgtcacgctgttcctccatgggaaaaggaaaatgtgtcagattttaatgattttgatgactgtaataaagagcagtaaataaagtgagtagtcatgtcttttgttgaccaccctccagattggttggaatcgatcggcgacggctttcgtgaatttctcggccttgaggcgggtcccccgaaacccaaggccaatcaacagaagcaagataacgctcgaggtcttgtgcttcctgggtacaagtatcttggtcctgggaacggccttgataagggcgatcctgtcaattttgctgacgaggttgcccgagagcacgacctctcctaccagaaacagcttgaggcgggcgataacccttacctcaagtacaaccacgcggacgcagagtttcaggagaaactcgcttctgacacttcttttgggggaaaccttgggaaggctgttttccaggctaaaaagaggattctcgaacctcttggcctggttgagacgccggataaaacggcgcctgcggcaaaaaagaggcctctagagcagagtcctcaagagccagactcctcgagcggagttggcaagaaaggcaaacagcctgccagaaagagactcaactttgacgacgaacctggagccggagacgggcctcccccagaaggaccatcttccggagctatgtctactgagactgaaatgcgtgcagcagctggcggaaatggtggcgatgcgggacaaggtgccgagggagtgggtaatgcctccggtgattggcattgcgattccacttggtcagagagccacgtcaccaccacctcaacccgcacctgggtcctgccgacctacaacaaccacctgtacctgcggctcggctcgagcaacgccagcgacaccttcaacggattctccaccccctggggatactttgactttaaccgcttccactgccacttctcgccaagagactggcaaaggctcatcaacaaccactggggactgcgccccaaaagcatgcaagtccgcatcttcaacatccaagttaaggaggtcacgacgtctaacggggagacgaccgtatccaacaacctcaccagcacggtccagatctttgcggacagcacgtacgagctcccgtacgtgatggatgcaggtcaggagggcagcttgcctcctttccccaacgacgtgttcatggtgcctcagtacgggtactgcggactggtaaccggaggcagctctcaaaaccagacagacagaaatgccttctactgtctggagtactttcccagccagatgctgagaaccggaaacaactttgagatggtgtacaagtttgaaaacgtgcccttccactccatgtacgctcacagccagagcctggataggctgatgaacccgctgctggaccagtacctgtgggagctccagtctaccacctctggaggaactctcaaccagggcaattcagccaccaactttgccaagctgaccaaaacaaacttttctggctaccgcaaaaactggctcccggggcccatgatgaagcagcagagattctccaagactgccagtcaaaactacaagattccccagggaagaaacaacagtctgctccattatgagaccagaactaccctcgacggaagatggagcaattttgccccgggaacggccatggcaaccgcagccaacgacgccaccgacttctctcaggcccagctcatctttgcggggcccaacatcaccggcaacaccaccacagatgccaataacctgatgttcacttcagaagatgaacttagggccaccaacccccgggacactgacctgtttggccacctggcaaccaaccagcaaaacgccaccaccgttcctaccgtagacgacgtggacggagtcggcgtgtacccgggaatggtgtggcaggacagagacatttactaccaagggcccatttgggccaaaattccacacacggatggacactttcacccgtctcctctcattggcggatttggactgaaaagcccgcctccacaaatattcatcaaaaacactcctgtacccgccaatcccgcaacgaccttctctccggccagaatcaacagcttcatcacccagtacagcaccggacaggtggctgtcaaaatagaatgggaaatccagaaggagcggtccaagagatggaacccagaggtccagttcacgtccaactacggagcacaggactcgcttctctgggctcccgacaacgccggagcctacaaagagcccagggccattggatcccgatacctcaccaaccacctctagcccaattctgttgcataccctcaataaaccgtgtattcgtttcagtaaaatactgcctcttgtggtcattcggcgtacaacagcttacaacaacaacaaaacccccttgctagagagtgtggcactcccccccctgtcgcgttcgctcgttcgctggctcgattgggggggtggcagctcaaagagctgccagacgacggccctctgggccgtcgcccccccaatcgagccagcgaacgagcgaacgcgacaggggggggagtgccac

SEQ ID NO: 517 - protein, 390 aa, Bovine adeno-associated virus
MALVSWLVEHGITSEKQWIQENQESYLSFNSTGNSRSQIKAALDNASKIMSLTKSASDYLVGQTVPEDISENRIWQIFDLNGYDPAYAGSVLYGWCTRAFGKRNTVWLYGPATTGKTNIAEAISHTVPFYGCVNWTNENFPFNDCVEKMLIWWEEGKMTSKVVEPAKAILGGSRVRVDQKCKSSVQVDSTPVIITSNTNMCVVVDGNSTTFEHQQPLEDRMFRFELMRRLPPDFGKITKQEVKDFFAWAKVNQVPVTHEFMVPKKVAGTERAETSRKRPLDDVTNTNYKSPEKRARLSVVPETPRSSDVPVEPAPLRPLNWSSRYECRCDYHAKFDSVTGECDECEYLNRGKNGCIFHNATHCQICHAVPPWEKENVSDFNDFDDCNKEQ

SEQ ID NO: 518 - protein, 610 aa, Bovine adeno-associated virus
MATFYEVIVRVPFDVEEHLPGISDNFVDWVTGQIWELPPESDLNLTLIEQPQLTVADRIRRVFLYEWNKFSKQESKFFVQFEKGSEYFHLHTLVETSGISSMVLGRYVSQIRAQLVKVVFQNIEPRINDWVAITKVKKGGANKVVDSGYIPAYLLPKVQPELQWAWTNLEEYKLAALNLEERKRLVAQFQLESSQRSQEASSQRDVSADPVIKSKTSQKYMALVSWLVEHGITSEKQWIQENQESYLSFNSTGNSRSQIKAALDNASKIMSLTKSASDYLVGQTVPEDISENRIWQIFDLNGYDPAYAGSVLYGWCTRAFGKRNTVWLYGPATTGKTNIAEAISHTVPFYGCVNWTNENFPFNDCVEKMLIWWEEGKMTSKVVEPAKAILGGSRVRVDQKCKSSVQVDSTPVIITSNTNMCVVVDGNSTTFEHQQPLEDRMFRFELMRRLPPDFGKITKQEVKDFFAWAKVNQVPVTHEFMVPKKVAGTERAETSRKRPLDDVTNTNYKSPEKRARLSVVPETPRSSDVPVEPAPLRPLNWSSRYECRCDYHAKFDSVTGECDECEYLNRGKNGCIFHNATHCQICHAVPPWEKENVSDFNDFDDCNKEQ

SEQ ID NO: 519 - protein, 538 aa, Artificial Sequence
  Description of Artificial Sequence: Synthetic polypeptide
MRAAAGGNGGDAGQGAEGVGNASGDWHCDSTWSESHVTTTSTRTWVLPTYNNHLYLRLGSSNASDTFNGFSTPWGYFDFNRFHCHFSPRDWQRLINNHWGLRPKSMQVRIFNIQVKEVTTSNGETTVSNNLTSTVQIFADSTYELPYVMDAGQEGSLPPFPNDVFMVPQYGYCGLVTGGSSQNQTDRNAFYCLEYFPSQMLRTGNNFEMVYKFENVPFHSMYAHSQSLDRLMNPLLDQYLWELQSTTSGGTLNQGNSATNFAKLTKTNFSGYRKNWLPGPMMKQQRFSKTASQNYKIPQGRNNSLLHYETRTTLDGRWSNFAPGTAMATAANDATDFSQAQLIFAGPNITGNTTTDANNLMFTSEDELRATNPRDTDLFGHLATNQQNATTVPTVDDVDGVGVYPGMVWQDRDIYYQGPIWAKIPHTDGHFHPSPLIGGFGLKSPPPQIFIKNTPVPANPATTFSPARINSFITQYSTGQVAVKIEWEIQKERSKRWNPEVQFTSNYGAQDSLLWAPDNAGAYKEPRAIGSRYLTNHL

SEQ ID NO: 520 - protein, 736 aa, Artificial Sequence
  Description of Artificial Sequence: Synthetic polypeptide
MSFVDHPPDWLESIGDGFREFLGLEAGPPKPKANQQKQDNARGLVLPGYKYLGPGNGLDKGDPVNFADEVAREHDLSYQKQLEAGDNPYLKYNHADAEFQEKLASDTSFGGNLGKAVFQAKKRILEPLGLVETPDKTAPAAKKRPLEQSPQEPDSSSGVGKKGKQPARKRLNFDDEPGAGDGPPPEGPSSGAMSTETEMRAAAGGNGGDAGQGAEGVGNASGDWHCDSTWSESHVTTTSTRTWVLPTYNNHLYLRLGSSNASDTFNGFSTPWGYFDFNRFHCHFSPRDWQRLINNHWGLRPKSMQVRIFNIQVKEVTTSNGETTVSNNLTSTVHIFADSTYELPYVMDAGQEGSLPPFPNDVFMVPQYGYCGLVTGGSSQNQTDRNAFYCLEYFPSQMLRTGNNFEMVYKFENVPFHSMYAHSQSLDRLMNPLLDQYLWELQSTTSGGTLNQGNSATNFAKLTNKNFSGYRKNWLPGPMMKQQRFSKTASQNYKIPQGGNNSLLHYETRTTLDRRWSNFAPGTAMATAANDATDFSQAQLIFAGPNITGNTTTDANNLMFTSEDELRATNPRDTDLFGHLATNQQNATTVPTVDDVDGVGVYPGMVWQDRDIYYQGPIWAKIPHTDGHFHPSPLIGGFGLKSPPPQIFIKNTPVPANPATTFSPARINSFITQYSTGQVAVKIEWEIQKERSKRWNPEVQFTSNYGAQDSLLWAPDNAGAYKEPRAIGSRYLTNHL

SEQ ID NO: 521 - protein, 736 aa, Artificial Sequence
  Description of Artificial Sequence: Synthetic polypeptide
MSFVDHPPDWLESIGDGFREFLGLEAGPPKPKANQQKQDNARGLVLPGYKYLGPGNGLDKGDPVNFADEVAREHDLSYQKQLEAGDNPYLKYNHADAEFQEKLASDTSFGGNLGKAVFQAKKRILEPLGLVETPDKTAPAAKKRPLEQSPQEPDSSSGVGKKGKQPARKRLNFDDEPGAGDGPPPEGPSSGAMSTETEMRAAAGGNGGDAGQGAEGVGNASGDWHCDSTWSESHVTTTSTRTWVLPTYNNHLYLRLGSSNASDTFNGFSTPWGYFDFNRFHCHFSPRDWQRLINNHWGLRPKSMQVRIFNIQVKEVTTSNGETTVSNNLTSTVQIFADSTYELPYVMDAGQEGSLPPFPNDVFMVPQYGYCGLVTGGSSQNQTDRNAFYCLEYFPSQMLRTGNNFEMVYKFENVPFHSMYAHSQSLDRLMNPLLDQYLWELQSTTSGGTLNQGNSATNFAKLTKTNFSGYRKNWLPGPMMKQQRFSKTASQNYKIPQGRNNSLLHYETRTTLDGRWSNFAPGTAMATAANDATDFSQAQLIFAGPNITGNTTTDANNLMFTSEDELRATNPRDTDLFGHLATNQQNATTVPTVDDVDGVGVYPGMVWQDRDIYYQGPIWAKIPHTDGHFHPSPLIGGFGLKSPPPQIFIKNTPVPANPATTFSPARINSFITQYSTGQVAVKIEWEIQKERSKRWNPEVQFTSNYGAQDSLLWAPDNAGAYKEPRAIGSRYLTNHL

SEQ ID NO: 522 - protein, 736 aa, Bovine adeno-associated virus; identical to SEQ ID NO: 521

SEQ ID NO: 523 - protein, 600 aa, Bovine adeno-associated virus
TAPAAKKRPLEQSPQEPDSSSGVGKKGKQPARKRLNFDDEPGAGDGPPPEGPSSGAMSTETEMRAAAGGNGGDAGQGAEGVGNASGDWHCDSTWSESHVTTTSTRTWVLPTYNNHLYLRLGSSNASDTFNGFSTPWGYFDFNRFHCHFSPRDWQRLINNHWGLRPKSMQVRIFNIQVKEVTTSNGETTVSNNLTSTVQIFADSTYELPYVMDAGQEGSLPPFPNDVFMVPQYGYCGLVTGGSSQNQTDRNAFYCLEYFPSQMLRTGNNFEMVYKFENVPFHSMYAHSQSLDRLMNPLLDQYLWELQSTTSGGTLNQGNSATNFAKLTKTNFSGYRKNWLPGPMMKQQRFSKTASQNYKIPQGRNNSLLHYETRTTLDGRWSNFAPGTAMATAANDATDFSQAQLIFAGPNITGNTTTDANNLMFTSEDELRATNPRDTDLFGHLATNQQNATTVPTVDDVDGVGVYPGMVWQDRDIYYQGPIWAKIPHTDGHFHPSPLIGGFGLKSPPPQIFIKNTPVPANPATTFSPARINSFITQYSTGQVAVKIEWEIQKERSKRWNPEVQFTSNYGAQDSLLWAPDNAGAYKEPRAIGSRYLTNHL

SEQ ID NO: 524 - DNA, 2214 bp, Artificial Sequence
  Description of Artificial Sequence: Synthetic polynucleotide
atggctgccgatggttatcttccagattggctcgaggacactctctctgaaggaataagacagtggtggaagctcaaacctggcccaccaccaccaaagcccgcagagcggcataaggacgacagcaggggtcttgtgcttcctgggtacaagtacctcggacccttcaacggactcgacaagggagagccggtcaacgaggcagacgccgcggccctcgagcacgacaaagcctacgaccggcagctcgacagcggagacaacccgtacctcaagtacaaccacgccgacgcggagtttcaggagcgccttaaagaagatacgtcttttgggggcaacctcgggcgagcagtcttccaggccaaaaagaggcttcttgaacctcttggtctggttgaggaagcggctaagacggctcctggaaagaagaggcctgtagagcagtctcctcaggaaccggactcctcctcgggcatcggcaagacaggccagcagcccgctaaaaagagactcaatttcggtcagactggcgacacagagtcagtcccagaccctcaaccaatcggagaacctcccgcagccccctcaggtgtgggatctcttacaatggcttcaggtggtggcgcaccagtggcagacaataacgaaggtgccgatggagtgggtagttcctcgggaaattggcattgcgattcccaatggctgggggacagagtcatcaccaccagcacccgaacctgggccctgcccacctacaacaatcacctctacaagcaaatctccaacgggacatcgggaggagccaccaacgacaacacctacttcggctacagcaccccctgggggtattttgactttaacagattccactgccacttttcaccacgtgactggcagcgactcatcaacaacaactggggattccggcccaagagactcagcttcaagctcttcaacatccaggtcaaggaggtcacgcagaatgaaggcaccaagaccatcgccaataaccttaccagcacggtccaggtcttcacggactcggagtaccagctgccgtacgttctcggctctgcccaccagggctgcctgcctccgttcccggcggacgtgttcatgattccccagtacggctacctaacactcaacaacggtagtcaggccgtgggacgctcctccttctactgcctggaatactttccttcgcagatgctgagaaccggcaacaacttccagtttacttacaccttcgaggacgtgcctttccacagcagctacgcccacagccagagcttggaccggctgatgaatcctctgattgaccagtacctgtactacttgtctcggactcaaacaacaggaggcacggcaaatacgcagactctgggcttcagccaaggtgggcctaatacaatggccaatcaggcaaagaactggctgccaggaccctgttaccgccaacaacgcgtctcaacgacaaccgggcaaaacaacaatagcaactttgcctggactgctgggaccaaataccatctgaatggaagaaattcattggctaatcctggcatcgctatggcaacacacaaagacgacaaggagcgtttttttcccagtaacgggatcctgatttttggcaaacaaaatgctgccagagacaatgcggattacagcgatgtcatgctcaccagcgaggaagaaatcaaaaccactaaccctgtggctacagaggaatacggtatcgtggcagataacttgcagcagcaaaacacggctcctcaaattggaactgtcaacagccagggggccttacccggtatggtttggcagaaccgggacgtgtacctgcagggtcccatctgggccaagattcctcacacggacggcaacttccacccgtctccgctgatgggcggctttggcctgaaacatcctccgcctcagatcctgatcaagaacacgcctgtacctgcggatcctccgaccaccttcaaccagtcaaagctgaactctttcatcacgcaatacagcaccggacaggtcagcgtggaaattgaatgggagctgcagaaggaaaacagcaagcgctggaaccccgagatccagtacacctccaactactacaaatctacaagtgtggactttgctgttaatacagaaggcgtgtactctgaaccccaccccattggcacccgttacctcacccgtcccctgtaa

SEQ ID NO: 525 - protein, 737 aa, Artificial Sequence
  Description of Artificial Sequence: Synthetic polypeptide
MAADGYLPDWLEDTLSEGIRQWWKLKPGPPPPKPAERHKDDSRGLVLPGYKYLGPFNGLDKGEPVNEADAAALEHDKAYDRQLDSGDNPYLKYNHADAEFQERLKEDTSFGGNLGRAVFQAKKRLLEPLGLVEEAAKTAPGKKRPVEQSPQEPDSSSGIGKTGQQPAKKRLNFGQTGDTESVPDPQPIGEPPAAPSGVGSLTMASGGGAPVADNNEGADGVGSSSGNWHCDSQWLGDRVITTSTRTWALPTYNNHLYKQISNGTSGGATNDNTYFGYSTPWGYFDFNRFHCHFSPRDWQRLINNNWGFRPKRLSFKLFNIQVKEVTQNEGTKTIANNLTSTVQVFTDSEYQLPYVLGSAHQGCLPPFPADVFMIPQYGYLTLNNGSQAVGRSSFYCLEYFPSQMLRTGNNFQFTYTFEDVPFHSSYAHSQSLDRLMNPLIDQYLYYLSRTQTTGGTANTQTLGFSQGGPNTMANQAKNWLPGPCYRQQRVSTTTGQNNNSNFAWTAGTKYHLNGRNSLANPGIAMATHKDDKERFFPSNGILIFGKQNAARDNADYSDVMLTSEEEIKTTNPVATEEYGIVADNLQQQNTAPQIGTVNSQGALPGMVWQNRDVYLQGPIWAKIPHTDGNFHPSPLMGGFGLKHPPPQILIKNTPVPADPPTTFNQSKLNSFITQYSTGQVSVEIEWELQKENSKRWNPEIQYTSNYYKSTSVDFAVNTEGVYSEPHPIGTRYLTRPL

SEQ ID NO: 526 - protein, 736 aa, Artificial Sequence
  Description of Artificial Sequence: Synthetic polypeptide
MAADGYLPDWLEDNLSEGIREWWDLKPGAPKPKANQQKQDDGRGLVLPGYKYLGPFNGLDKGEPVNAADAAALEHDKAYDQQLKAGDNPYLRYNHADAEFQERLQEDTSFGGNLGRAVFQAKKRVLEPLGLVEEGAKTAPGKKRPVEQSPQEPDSSSGIGKTGQQPAKKRLNFGQTGDTESVPDPQPIGEPPAAPSGVGSLTMASGGGAPVADNNEGADGVGSSSGNWHCDSQWLGDRVITTSTRTWALPTYNNHLYKQISSASTGASNDNHYFGYSTPWGYFDFNRFHCHFSPRDWQRLINNNWGFRPKRLNFKLFNIQVKEVTDNNGVKTIANNLTSTVQVFTDSDYQLPYVLGSAHQGCLPPFPADVFMIPQYGYLTLNNGSQAVGRSSFYCLEYFPSQMLRTGNNFQFTYTFEDVPFHSSYAHSQSLDRLMNPLIDQYLYYLSRTQTTGGTANTQTLGFSQGGPNTMANQAKNWLPGPCYRQQRVSTTTGQNNNSNFAWTAGTKYHLNGRNSLANPGIAMATHKDDKERFFPSNGILIFGKQNAARDNADYSDVMLTSEEEIKTTNPVATEEYGIVADNLQQQNTAPQIGTVNSQGALPGMVWQNRDVYLQGPIWAKIPHTDGNFHPSPLMGGFGLKHPPPQILIKNTPVPADPPTTFNQSKLNSFITQYSTGQVSVEIEWELQKENSKRWNPEIQYTSNYYKSTSVDFAVNTEGVYSEPHPIGTRYLTRPL

SEQ ID NO: 527 - protein, 736 aa, Artificial Sequence
  Description of Artificial Sequence: Synthetic polypeptide
MAADGYLPDWLEDTLSEGIRQWWKLKPGPPPPKPAERHKDDSRGLVLPGYKYLGPFNGLDKGEPVNEADAAALEHDKAYDRQLDSGDNPYLKYNHADAEFQERLQGDTSFGGNLGRAVFQAKKRVLEPLGLVEEGAKTAPGKKRPVEQSPQEPDSSSGIGETGQQPAKKRLNFGQTGDSESVPDPQPLGEPPATPAAVGPTTMASGGGAPMADNNEGADGVGSSSGNWHCDSQWLGDRVITTSTRTWALPTYNNHLYKQISSASTGASNDNHYFGYSTPWGYFDFNRFHCHFSPRDWQRLINNNWGFRPKRLSFKLFNIQVKEVTDNNGVKTIANNLTSTVQVFTDSEYQLPYVLGSAHQGCLPPFPADVFMIPQYGYLTLNNGSQAVGRSSFYCLEYFPSQMLRTGNNFTFSYTFEDVPFHSSYAHSQSLDRLMNPLIDQYLYYLSRTQTTGGTANTQTLGFSQGGPNTMANQAKNWLPGPCYRQQRVSTTTGQNNNSNFAWTAGTKYHLNGRNSLANPGIAMATHKDDKERFFPSNGILIFGKQNAARDNADYSDVMLTSEEEIKTTNPVATEEYGIVADNLQQQNTAPQIGTVNSQGALPGMVWQNRDVYLQGPIWAKIPHTDGNFHPSPLMGGFGLKHPPPQILIKNTPVPADPPTTFNQSKLNSFITQYSTGQVSVEIEWELQKENSKRWNPEIQYTSNYYKSTSVDFAVNTEGVYSEPHPIGTRYLTRPL

SEQ ID NO: 528 - DNA, 2181 bp, Artificial Sequence
  Description of Artificial Sequence: Synthetic polynucleotide
atgtcttttgttgatcaccctccagattggttggaagaagttggtgaaggtcttcgcgagtttttgggccttgaagcgggcccaccgaaaccaaaacccaatcagcagcatcaagatcaagcccgtggtcttgtgctgcctggttataactatctcggacccggaaacggtctcgatcgaggagagcctgtcaacagggcagacgaggtcgcgcgagagcacgacatctcgtacaacgagcagcttgaggcgggagacaacccctacctcaagtacaaccacgcggacgccgagtttcaggagaagctcgccgacgacacatccttcgggggaaacctcggaaaggcagtctttcaggccaagaaaagggttctcgaaccttttggcctggttgaagagggtgctaagacggcccctaccggaaagcggatagacgaccactttccaaaaagaaagaaggctcggaccgaagaggactccaagccttccacctcgtcagacgccgaagctggacccagcggatcccagcagctgcaaatcccagcacaaccagcctcaagtttgggagctgatacaatgtctgcgggaggtggcggcccattgggcgacaataaccaaggtgccgatggagtgggcaatgcctcgggagattggcattgcgattccacgtggatgggggacagagtcgtcaccaagtccacccgcacctgggtgctgcccagctacaacaaccaccagtaccgagagatcaaaagcggctccgtcgacggaagcaacgccaacgcctactttggatacagcaccccctgggggtactttgactttaaccgcttccacagccactggagcccccgagactggcaaagactcatcaacaactattggggcttcagaccccggtctctcagagtcaaaatcttcaacatccaagtcaaagaggtcacggtgcaggactccaccaccaccatcgccaacaacctcacctccaccgtccaagtgtttacggacgacgactaccaactcccgtacgtcgtcggcaacgggaccgagggatgcctgccggccttccccccgcaggtctttacgctgccgcagtacggctacgcgacgctgaaccgagacaacggagacaacccgacagagcggagcagcttcttttgcctagagtactttcccagcaagatgctgaggacgggcaacaactttgagtttacctacagctttgaagaggtgcccttccactgcagcttcgccccgagccagaacctctttaagctggccaacccgctggtggaccagtacctgtaccgcttcgtgagcacctcggccacgggcgccatccagttccaaaagaacctggcgggcagatacgccaacacctacaaaaactggttcccggggcccatgggccgaacccagggctggaacacgagctctggggtcagcagcaccaacagagtcagcgtcaacaacttttccgtctcaaaccggatgaacctggagggggccagctaccaagtgaacccccagcccaacgggatgacaaacacgctccaaggcagcaaccgctacgcgctggaaaacaccatgatcttcaacgctcaaaacgccacgccgggaactacctcggtgtacccagaggacaatctactgctgaccagcgagagcgagactcagcccgtcaaccgggtggcttacaacacgggcggtcagatggccaccaacgcccagaacgccaccacggctcccacggtcgggacctacaacctccaggaagtgcttcctggcagcgtatggatggagagggacgtgtacctccaaggacccatctgggccaagatcccagagacgggggcgcactttcacccctctccggccatgggcggattcggactcaaacacccgccgcccatgatgctcatcaaaaacacgccggtgcccggcaacatcaccagcttctcggacgtgcccgtcagcagcttcatcacccagtacagcaccgggcaggtcaccgtggagatggaatgggagctcaaaaaggaaaactccaagaggtggaacccagagatccagtacaccaacaactacaacgacccccagtttgtggactttgctccagacggctccggcgaatacagaaccaccagagccatcggaacccgatacctcacccgacccctt

SEQ ID NO: 529 - protein, 726 aa, Artificial Sequence
  Description of Artificial Sequence: Synthetic polypeptide
MSFVDHPPDWLEEVGEGLREFLGLEAGPPKPKPNQQHQDQARGLVLPGYNYLGPGNGLDRGEPVNRADEVAREHDISYNEQLEAGDNPYLKYNHADAEFQEKLADDTSFGGNLGKAVFQAKKRVLEPFGLVEEGAKTAPTGKRIDDHFPKRKKARTEEDSKPSTSSDAEAGPSGSQQLQIPAQPASSLGADTMSAGGGGPLGDNNQGADGVGNASGDWHCDSTWMGDRVVTKSTRTWVLPSYNNHQYREIKSGSVDGSNANAYFGYSTPWGYFDFNRFHSHWSPRDWQRLINNYWGFRPRSLRVKIFNIQVKEVTVQDSTTTIANNLTSTVQVFTDDDYQLPYVVGNGTEGCLPAFPPQVFTLPQYGYATLNRDNGDNPTERSSFFCLEYFPSKMLRTGNNFEFTYSFEEVPFHCSFAPSQNLFKLANPLVDQYLYRFVSTSATGAIQFQKNLAGRYANTYKNWFPGPMGRTQGWNTSSGSSTNRVSVNNFSVSNRMNLEGASYQVNPQPNGMTNTLQGSNRYALENTMIFNAQNATPGTTSVYPEDNLLLTSESETQPVNRVAYNTGGQMATNAQNATTAPTVGTYNLQEVLPGSVWMERDVYLQGPIWAKIPETGAHFHPSPAMGGFGLKHPPPMMLIKNTPVPGNITSFSDVPVSSFITQYSTGQVTVEMEWELKKENSKRWNPEIQYTNNYNDPQFVDFAPDGSGEYRTTRAIGTRYLTRPL

SEQ ID NO: 530 - protein, 735 aa, Artificial Sequence
  Description of Artificial Sequence: Synthetic polypeptide
MAADGYLPDWLEDTLSEGIRQWWKLKPGPPPPKPAERHKDDSRGLVLPGYKYLGPFNGLDKGEPVNEADAAALEHDKAYDRQLDSGDNPYLKYNHADAEFQERLKEDTSFGGNLGRAVFQAKKRILEPLGLVEEPVKTAPGKKRPVEHSPAEPDSSSGTGKSGQQPARKRLNFGQTGDADSVPDPQPLGQPPAAPSGLGTNTMASGSGAPMADNNEGADGVGNSSGNWHCDSTWMGDRVITTSTRTWALPTYNNHLYKQISSQSGASNDNHYFGYSTPWGYFDFNRFHCHFSPRDWQRLINNNWGFRPKRLSFKLFNIQVKEVTQNDGTTTIANNLTSTVQVFTDSEYQLPYVLGSAHQGCLPPFPADVFMVPQYGYLTLNNGSQAVGRSSFYCLEYFPSQMLRTGNNFTFSYTFEDVPFHSSYAHSQSLDRLMNPLIDQYLYYLSRTNTPSGTTTMSRLQFSQAGASDIRDQSRNWLPGPCYRQQRVSKTAADNNNSDYSWTGATKYHLNGRDSLVNPGPAMASHKDDEEKYFPQSGVLIFGKQDSGKTNVDIEKVMITDEEEIRTTNPVATEQYGSVSTNLQSGNTQAATSDVNTQGVLPGMVWQDRDVYLQGPIWAKIPHTDGHFHPSPLMGGFGLKHPPPQILIKNTPVPANPSTTFSAAKFASFITQYSTGQVSVEIEWELQKENSKRWNPEIQYTSNYNKSVNVDFTVDTNGVYSEPRPIGTRYLTRNL

SEQ ID NO: 531 - DNA, 1797 bp, Artificial Sequence
  Description of Artificial Sequence: Synthetic polynucleotide
acggctccgaccggagacaagcggaaaggcgaagacgaacctcgtttgcccgacacttcttcacagactcccaagaaaaacaagaagcctcgcaaggaaagaccttccggcggggcagaagatccgggcgaaggcacctcttccaacgctggagcagcagcacccgcctctagtgtgggatcatctatcatggctgaaggaggtggcggcccagtgggcgatgcaggccagggtgccgatggagtgggcaattcctccggaaattggcattgcgattcccaatggctggaaaacggagtcgtcactcgaaccacccgaacctgggtcttgcccagctacaacaaccacctgtacaaacgaatccaaggacccagcggaggcgacaacaacaacaaattctttggattcagcaccccctggggatactttgactacaatcgattccactgccacttttccccgcgagactggcaacgactcatcaacaacaactggggcatccgtcccaaagcgatgcgctttagactctttaacatccaggttaaagaggtcacggtccaagacttcaacaccaccatcggcaacaacctcaccagtacggtccaggtctttgcggacaaggactaccaactgccgtacgtcctcggatcggctaccgaaggcaccttcccgccgttcccagcggatatctacacgatcccgcagtacgggtactgcacgctaaactacaacaacgaggcggtggatcgttcggccttctactgtctggactactttccctcagacatgctgcggacaggaaataactttgagtttacttacaccttcgaggacgttcctttccatagcatgtttgcccacaaccagacgctagaccggctgatgaatcccctcgtggatcagtacctctgggctttcagctccgtcagccaagcaggctcatctggacgagctcttcattactcgcgggcgactaaaaccaacatggcggctcaatataggaactggttacctgggcctttcttccgtgatcagcaaatctttacgggcgctagcaacatcactaaaaataacgtctttagcgtttgggaaaaaggcaagcaatgggaactcgacaatcggaccaacctaatgcagcccggtcctgcggcagcgaccacctttagcggagaacctgaccgtcaagccatgcaaaacacgctggcttttagcaggaccgtctacgatcaaacgaccgccacgaccgatcgtaaccagatactcatcaccaacgaagacgaaatcagacccaccaactcggtcggtatcgacgcgtggggagcagttcccaccaacaaccagtcgatcgtgacccccggcactcgcgcggccgtcaacaatcaaggggcgcttcccgggatggtgtggcaaaacagagacatttaccctacagggacccatttggccaaaattcccgacactgacaatcacttccatccgtccccgcttattgggcggtttggctgcaagcatccccctccccagattttcattaaaaacacacccgtccctgccaacccttcggaaacgttccagacggccaaagtggcctccttcatcaaccagtactcgaccggacagtgcaccgtcgaaatcttttgggaactcaagaaggaaacctccaagcgctggaaccccgaaatccagttcacctccaactttggcaacgcggccgacatccagtttgccgtctccgacacgggatcctattccgaacctcgtcccatcggtacccgttaccttaccaaacctctgtaa

SEQ ID NO: 532 - DNA, 1989 bp, Artificial Sequence
  Description of Artificial Sequence: Synthetic polynucleotide
atgaggtcgtactacgaggtcatcgttcagctgcccaacgacgtcgagagtcaggtacctggaatctccgattcgttcgtcaactggattacgtcgcgagaatggacgttgcctgaggacgccgattgggatttggaccaggtcgatcaagttcaactgacgctcggcgacaaaatccaacgggagattcgaactcattgggggacgatggccaaagaaccggactttcactattttatccaactggaacaaggtgaggtgttctttcatttacacgtcctgctggaaacgtgttccgtaaagccgatggtactcggaagatatatccgacatattcaacaaaaaattgtgagtaaagtctactgcgccacgagcctacgatggaaggatggatgcgtggtgaccaagaccaaaaatttcgggggcgcgaacaaggtccgggccgagtcgtatattcccgcctacctgatcccgaaacagcaaccggaagtgcagtgggcgtggactaacgtgcccgagtatataaaagcgtgcttgcaccgagaactgcgtgccagtctcgcgcgacttcacttcgaggaggcgggcgtctcgcaatccaaggaaaatctcgcgagaactgcagacggcgctcccgtgatgccgacccgcgtcagcaaacgctacatggagctcgtggattggctcgtggagaaggggatcaccaccgagaaggaatggctgctggaaaacagagaaagctttcggagctttcaggcctcgagcaactcggcgcgtcagatcaagacggccctgcaaggcgccattcaggagatgcttctgaccaagacggcggaggactacctcgtcggaaaggatcccgtctcggacgacgacatccgtcagaaccgcatctacaagattctggaactgaaccactacgacccagcgtacgtggggagtattttggtcgggtggtgccagaagaaatggggcaagcgaaacacgctgtggctgttcggacatgcgaccaccggcaagaccaacatcgcggaggctattgcccatgctgtgccgttctatggatgcgttaactggaccaacgagaactttccgttcaacgactgcgtcgaaaaaatgattatctggtgggaggagggcaaaatgaccgccaaagtggtggaaacagccaaggcgattctgggaggatctcgggtgagagtggaccaaaaatgcaaagcttcggttccgatcgaaccgacgccggtcattattaccagtaacaccaacatgtgttatgtcatcgacgggaacacgaccacgttcgagcataagcagccgttggaggacaggatgtttaagctcgaattgctgactcggttgcctgatgactttggtaaggtgaccaaacaggaggtgcgtcaattcttcaggtggtctcaggatcacctgacccctgtgatcccagaattcctagtgcggaaggcggagtctcgcaaaagacccgccccttccggggaaggctatataagcccgacaaagcggcccgcgctcgcagagcagcagcaggcgtcggagagcgcggacccggttcccaccaggtatcgtatcaaatgctcgaaacattgcggtatggataaaatgttgtttccttgccaaatttgtgaatcgatgaacagagatattaatatttgtgctattcataaaacgaccgactgtaaagagtgtttccccgactacggggataaagatgatgtagaactacccccctgtacagaacacaacgtgtctcgttgttatcaatgtcattcgggcgaattgtatcgcgtgacttcggactctgacgagaaacctgcccccgagagtgatgaaggcaccgagccatcctatgctccctgcacgattcaccacctgatgggcaagagtcacgggttagtcacttgcgcggcgtgtcggttgaaaaatagtacgttgcatgatgacttggatgacggtgatctcgaacaataa

SEQ ID NO: 533 - DNA, 1626 bp, Artificial Sequence
  Description of Artificial Sequence: Synthetic polynucleotide
atgaggtcgtactacgaggtcatcgttcagctgcccaacgacgtcgagagtcaggtacctggaatctccgattcgttcgtcaactggattacgtcgcgagaatggacgttgcctgaggacgccgattgggatttggaccaggtcgatcaagttcaactgacgctcggcgacaaaatccaacgggagattcgaactcattgggggacgatggccaaagaaccggactttcactattttatccaactggaacaaggtgaggtgttctttcatttacacgtcctgctggaaacgtgttccgtaaagccgatggtactcggaagatatatccgacatattcaacaaaaaattgtgagtaaagtctactgcgccacgagcctacgatggaaggatggatgcgtggtgaccaagaccaaaaatttcgggggcgcgaacaaggtccgggccgagtcgtatattcccgcctacctgatcccgaaacagcaaccggaagtgcagtgggcgtggactaacgtgcccgagtatataaaagcgtgcttgcaccgagaactgcgtgccagtctcgcgcgacttcacttcgaggaggcgggcgtctcgcaatccaaggaaaatctcgcgagaactgcagacggcgctcccgtgatgccgacccgcgtcagcaaacgctacatggagctcgtggattggctcgtggagaaggggatcaccaccgagaaggaatggctgctggaaaacagagaaagctttcggagctttcaggcctcgagcaactcggcgcgtcagatcaagacggccctgcaaggcgccattcaggagatgcttctgaccaagacggcggaggactacctcgtcggaaaggatcccgtctcggacgacgacatccgtcagaaccgcatctacaagattctggaactgaaccactacgacccagcgtacgtggggagtattttggtcgggtggtgccagaagaaatggggcaagcgaaacacgctgtggctgttcggacatgcgaccaccggcaagaccaacatcgcggaggctattgcccatgctgtgccgttctatggatgcgttaactggaccaacgagaactttccgttcaacgactgcgtcgaaaaaatgattatctggtgggaggagggcaaaatgaccgccaaagtggtggaaacagccaaggcgattctgggaggatctcgggtgagagtggaccaaaaatgcaaagcttcggttccgatcgaaccgacgccggtcattattaccagtaacaccaacatgtgttatgtcatcgacgggaacacgaccacgttcgagcataagcagccgttggaggacaggatgtttaagctcgaattgctgactcggttgcctgatgactttggtaaggtgaccaaacaggaggtgcgtcaattcttcaggtggtctcaggatcacctgacccctgtgatcccagaattcctagtgcggaaggcggagtctcgcaaaagacccgccccttccggggaaggctatataagcccgacaaagcggcccgcgctcgcagagcagcagcaggcgtcggagagcgcggacccggttcccaccagattggttggagcggttggtcaaaaagggagtgaatgctgcagctga

SEQ ID NO: 534 - DNA, 1323 bp, Artificial Sequence
  Description of Artificial Sequence: Synthetic polynucleotide
atggagctcgtggattggctcgtggagaaggggatcaccaccgagaaggaatggctgctggaaaacagagaaagctttcggagctttcaggcctcgagcaactcggcgcgtcagatcaagacggccctgcaaggcgccattcaggagatgcttctgaccaagacggcggaggactacctcgtcggaaaggatcccgtctcggacgacgacatccgtcagaaccgcatctacaagattctggaactgaaccactacgacccagcgtacgtggggagtattttggtcgggtggtgccagaagaaatggggcaagcgaaacacgctgtggctgttcggacatgcgaccaccggcaagaccaacatcgcggaggctattgcccatgctgtgccgttctatggatgcgttaactggaccaacgagaactttccgttcaacgactgcgtcgaaaaaatgattatctggtgggaggagggcaaaatgaccgccaaagtggtggaaacagccaaggcgattctgggaggatctcgggtgagagtggaccaaaaatgcaaagcttcggttccgatcgaaccgacgccggtcattattaccagtaacaccaacatgtgttatgtcatcgacgggaacacgaccacgttcgagcataagcagccgttggaggacaggatgtttaagctcgaattgctgactcggttgcctgatgactttggtaaggtgaccaaacaggaggtgcgtcaattcttcaggtggtctcaggatcacctgacccctgtgatcccagaattcctagtgcggaaggcggagtctcgcaaaagacccgccccttccggggaaggctatataagcccgacaaagcggcccgcgctcgcagagcagcagcaggcgtcggagagcgcggacccggttcccaccaggtatcgtatcaaatgctcgaaacattgcggtatggataaaatgttgtttccttgccaaatttgtgaatcgatgaacagagatattaatatttgtgctattcataaaacgaccgactgtaaagagtgtttccccgactacggggataaagatgatgtagaactacccccctgtacagaacacaacgtgtctcgttgttatcaatgtcattcgggcgaattgtatcgcgtgacttcggactctgacgagaaacctgcccccgagagtgatgaaggcaccgagccatcctatgctccctgcacgattcaccacctgatgggcaagagtcacgggttagtcacttgcgcggcgtgtcggttgaaaaatagtacgttgcatgatgacttggatgacggtgatctcgaacaataa

SEQ ID NO: 535 - DNA, 960 bp, Artificial Sequence
  Description of Artificial Sequence: Synthetic polynucleotide
atggagctcgtggattggctcgtggagaaggggatcaccaccgagaaggaatggctgctggaaaacagagaaagctttcggagctttcaggcctcgagcaactcggcgcgtcagatcaagacggccctgcaaggcgccattcaggagatgcttctgaccaagacggcggaggactacctcgtcggaaaggatcccgtctcggacgacgacatccgtcagaaccgcatctacaagattctggaactgaaccactacgacccagcgtacgtggggagtattttggtcgggtggtgccagaagaaatggggcaagcgaaacacgctgtggctgttcggacatgcgaccaccggcaagaccaacatcgcggaggctattgcccatgctgtgccgttctatggatgcgttaactggaccaacgagaactttccgttcaacgactgcgtcgaaaaaatgattatctggtgggaggagggcaaaatgaccgccaaagtggtggaaacagccaaggcgattctgggaggatctcgggtgagagtggaccaaaaatgcaaagcttcggttccgatcgaaccgacgccggtcattattaccagtaacaccaacatgtgttatgtcatcgacgggaacacgaccacgttcgagcataagcagccgttggaggacaggatgtttaagctcgaattgctgactcggttgcctgatgactttggtaaggtgaccaaacaggaggtgcgtcaattcttcaggtggtctcaggatcacctgacccctgtgatcccagaattcctagtgcggaaggcggagtctcgcaaaagacccgccccttccggggaaggctatataagcccgacaaagcggcccgcgctcgcagagcagcagcaggcgtcggagagcgcggacccggttcccaccagattggttggagcggttggtcaaaaagggagtgaatgctgcagctga

SEQ ID NO: 536 - DNA, 1608 bp, Artificial Sequence
  Description of Artificial Sequence: Synthetic polynucleotide
atggctgaaggaggtggcggcccagtgggcgatgcaggccagggtgccgatggagtgggcaattcctccggaaattggcattgcgattcccaatggctggaaaacggagtcgtcactcgaaccacccgaacctgggtcttgcccagctacaacaaccacctgtacaaacgaatccaaggacccagcggaggcgacaacaacaacaaattctttggattcagcaccccctggggatactttgactacaatcgattccactgccacttttccccgcgagactggcaacgactcatcaacaacaactggggcatccgtcccaaagcgatgcgctttagactctttaacatccaggttaaagaggtcacggtccaagacttcaacaccaccatcggcaacaacctcaccagtacggtccaggtctttgcggacaaggactaccaactgccgtacgtcctcggatcggctaccgaaggcaccttcccgccgttcccagcggatatctacacgatcccgcagtacgggtactgcacgctaaactacaacaacgaggcggtggatcgttcggccttctactgtctggactactttccctcagacatgctgcggacaggaaataactttgagtttacttacaccttcgaggacgttcctttccatagcatgtttgcccacaaccagacgctagaccggctgatgaatcccctcgtggatcagtacctctgggctttcagctccgtcagccaagcaggctcatctggacgagctcttcattactcgcgggcgactaaaaccaacatggcggctcaatataggaactggttacctgggcctttcttccgtgatcagcaaatctttacgggcgctagcaacatcactaaaaataacgtctttagcgtttgggaaaaaggcaagcaatgggaactcgacaatcggaccaacctaatgcagcccggtcctgcggcagcgaccacctttagcggagaacctgaccgtcaagccatgcaaaacacgctggcttttagcaggaccgtctacgatcaaacgaccgccacgaccgatcgtaaccagatactcatcaccaacgaagacgaaatcagacccaccaactcggtcggtatcgacgcgtggggagcagttcccaccaacaaccagtcgatcgtgacccccggcactcgcgcggccgtcaacaatcaaggggcgcttcccgggatggtgtggcaaaacagagacatttaccctacagggacccatttggccaaaattcccgacactgacaatcacttccatccgtccccgcttattgggcggtttggctgcaagcatccccctccccagattttcattaaaaacacacccgtccctgccaacccttcggaaacgttccagacggccaaagtggcctccttcatcaaccagtactcgaccggacagtgcaccgtcgaaatcttttgggaactcaagaaggaaacctccaagcgctggaaccccgaaatccagttcacctccaactttggcaacgcggccgacatccagtttgccgtctccgacacgggatcctattccgaacctcgtcccatcggtacccgttaccttaccaaacctctgtaa

SEQ ID NO: 537 - DNA, 2232 bp, Artificial Sequence
  Description of Artificial Sequence: Synthetic polynucleotide
atgtctctcatttctgatgcgattccagattggttggagcggttggtcaaaaagggagtgaatgctgcagctgatttctaccatttggaaagcggtcctcctcgtcctaaggcaaatcagcaaactcaagaatctcttgaaaaggacgattcgagaggtctcgtgttcccaggctacaattatctaggccctttcaacggtctagataaaggagaacccgtcaacgaggcagacgctgccgccttagaacacgacaaggcttacgacctcgaaatcaaggacgggcacaacccgtactttgagtacaacgaggccgacagacgtttccaggaacgtctcaaagacgatacctcctttggaggcaatttaggtaaagccatcttccaggccaaaaagagggttctcgaaccctttggtctggtggaagactcaaagacggctccgaccggagacaagcggaaaggcgaagacgaacctcgtttgcccgacacttcttcacagactcccaagaaaaacaagaagcctcgcaaggaaagaccttccggcggggcagaagatccgggcgaaggcacctcttccaacgctggagcagcagcacccgcctctagtgtgggatcatctatcatggctgaaggaggtggcggcccagtgggcgatgcaggccagggtgccgatggagtgggcaattcctccggaaattggcattgcgattcccaatggctggaaaacggagtcgtcactcgaaccacccgaacctgggtcttgcccagctacaacaaccacctgtacaaacgaatccaaggacccagcggaggcgacaacaacaacaaattctttggattcagcaccccctggggatactttgactacaatcgattccactgccacttttccccgcgagactggcaacgactcatcaacaacaactggggcatccgtcccaaagcgatgcgctttagactctttaacatccaggttaaagaggtcacggtccaagacttcaacaccaccatcggcaacaacctcaccagtacggtccaggtctttgcggacaaggactaccaactgccgtacgtcctcggatcggctaccgaaggcaccttcccgccgttcccagcggatatctacacgatcccgcagtacgggtactgcacgctaaactacaacaacgaggcggtggatcgttcggccttctactgtctggactactttccctcagacatgctgcggacaggaaataactttgagtttacttacaccttcgaggacgttcctttccatagcatgtttgcccacaaccagacgctagaccggctgatgaatcccctcgtggatcagtacctctgggctttcagctccgtcagccaagcaggctcatctggacgagctcttcattactcgcgggcgactaaaaccaacatggcggctcaatataggaactggttacctgggcctttcttccgtgatcagcaaatctttacgggcgctagcaacatcactaaaaataacgtctttagcgtttgggaaaaaggcaagcaatgggaactcgacaatcggaccaacctaatgcagcccggtcctgcggcagcgaccacctttagcggagaacctgaccgtcaagccatgcaaaacacgctggcttttagcaggaccgtctacgatcaaacgaccgccacgaccgatcgtaaccagatactcatcaccaacgaagacgaaatcagacccaccaactcggtcggtatcgacgcgtggggagcagttcccaccaacaaccagtcgatcgtgacccccggcactcgcgcggccgtcaacaatcaaggggcgcttcccgggatggtgtggcaaaacagagacatttaccctacagggacccatttggccaaaattcccgacactgacaatcacttccatccgtccccgcttattgggcggtttggctgcaagcatccccctccccagattttcattaaaaacacacccgtccctgccaacccttcggaaacgttccagacggccaaagtggcctccttcatcaaccagtactcgaccggacagtgcaccgtcgaaatcttttgggaactcaagaaggaaacctccaagcgctggaaccccgaaatccagttcacctccaactttggcaacgcggccgacatccagtttgccgtctccgacacgggatcctattccgaacctcgtcccatcggtacccgttaccttaccaaacctctgtaa

SEQ ID NO: 538 - protein, 535 aa, Artificial Sequence
  Description of Artificial Sequence: Synthetic polypeptide
MAEGGGGPVGDAGQGADGVGNSSGNWHCDSQWLENGVVTRTTRTWVLPSYNNHLYKRIQGPSGGDNNNKFFGFSTPWGYFDYNRFHCHFSPRDWQRLINNNWGIRPKAMRFRLFNIQVKEVTVQDFNTTIGNNLTSTVQVFADKDYQLPYVLGSATEGTFPPFPADIYTIPQYGYCTLNYNNEAVDRSAFYCLDYFPSDMLRTGNNFEFTYTFEDVPFHSMFAHNQTLDRLMNPLVDQYLWAFSSVSQAGSSGRALHYSRATKTNMAAQYRNWLPGPFFRDQQIFTGASNITKNNVFSVWEKGKQWELDNRTNLMQPGPAAATTFSGEPDRQAMQNTLAFSRTVYDQTTATTDRNQILITNEDEIRPTNSVGIDAWGAVPTNNQSIVTPGTRAAVNNQGALPGMVWQNRDIYPTGTHLAKIPDTDNHFHPSPLIGRFGCKHPPPQIFIKNTPVPANPSETFQTAKVASFINQYSTGQCTVEIFWELKKETSKRWNPEIQFTSNFGNAADIQFAVSDTGSYSEPRPIGTRYLTKPL

SEQ ID NO: 539 - protein, 440 aa, Artificial Sequence
  Description of Artificial Sequence: Synthetic polypeptide
MELVDWLVEKGITTEKEWLLENRESFRSFQASSNSARQIKTALQGAIQEMLLTKTAEDYLVGKDPVSDDDIRQNRIYKILELNHYDPAYVGSILVGWCQKKWGKRNTLWLFGHATTGKTNIAEAIAHAVPFYGCVNWTNENFPFNDCVEKMIIWWEEGKMTAKVVETAKAILGGSRVRVDQKCKASVPIEPTPVIITSNTNMCYVIDGNTTTFEHKQPLEDRMFKLELLTRLPDDFGKVTKQEVRQFFRWSQDHLTPVIPEFLVRKAESRKRPAPSGEGYISPTKRPALAEQQQASESADPVPTRYRIKCSKHCGMDKMLFPCQICESMNRDINICAIHKTTDCKECFPDYGDKDDVELPPCTEHNVSRCYQCHSGELYRVTSDSDEKPAPESDEGTEPSYAPCTIHHLMGKSHGLVTCAACRLKNSTLHDDLDDGDLEQ

SEQ ID NO: 540 - protein, 319 aa, Artificial Sequence
  Description of Artificial Sequence: Synthetic polypeptide
MELVDWLVEKGITTEKEWLLENRESFRSFQASSNSARQIKTALQGAIQEMLLTKTAEDYLVGKDPVSDDDIRQNRIYKILELNHYDPAYVGSILVGWCQKKWGKRNTLWLFGHATTGKTNIAEAIAHAVPFYGCVNWTNENFPFNDCVEKMIIWWEEGKMTAKVVETAKAILGGSRVRVDQKCKASVPIEPTPVIITSNTNMCYVIDGNTTTFEHKQPLEDRMFKLELLTRLPDDFGKVTKQEVRQFFRWSQDHLTPVIPEFLVRKAESRKRPAPSGEGYISPTKRPALAEQQQASESADPVPTRLVGAVGQKGSECCS

SEQ ID NO: 541 - protein, 662 aa, Artificial Sequence
  Description of Artificial Sequence: Synthetic polypeptide
MRSYYEVIVQLPNDVESQVPGISDSFVNWITSREWTLPEDADWDLDQVDQVQLTLGDKIQREIRTHWGTMAKEPDFHYFIQLEQGEVFFHLHVLLETCSVKPMVLGRYIRHIQQKIVSKVYCATSLRWKDGCVVTKTKNFGGANKVRAESYIPAYLIPKQQPEVQWAWTNVPEYIKACLHRELRASLARLHFEEAGVSQSKENLARTADGAPVMPTRVSKRYMELVDWLVEKGITTEKEWLLENRESFRSFQASSNSARQIKTALQGAIQEMLLTKTAEDYLVGKDPVSDDDIRQNRIYKILELNHYDPAYVGSILVGWCQKKWGKRNTLWLFGHATTGKTNIAEAIAHAVPFYGCVNWTNENFPFNDCVEKMIIWWEEGKMTAKVVETAKAILGGSRVRVDQKCKASVPIEPTPVIITSNTNMCYVIDGNTTTFEHKQPLEDRMFKLELLTRLPDDFGKVTKQEVRQFFRWSQDHLTPVIPEFLVRKAESRKRPAPSGEGYISPTKRPALAEQQQASESADPVPTRYRIKCSKHCGMDKMLFPCQICESMNRDINICAIHKTTDCKECFPDYGDKDDVELPPCTEHNVSRCYQCHSGELYRVTSDSDEKPAPESDEGTEPSYAPCTIHHLMGKSHGLVTCAACRLKNSTLHDDLDDGDLEQ

SEQ ID NO: 542 - protein, 541 aa, Artificial Sequence
  Description of Artificial Sequence: Synthetic polypeptide
MRSYYEVIVQLPNDVESQVPGISDSFVNWITSREWTLPEDADWDLDQVDQVQLTLGDKIQREIRTHWGTMAKEPDFHYFIQLEQGEVFFHLHVLLETCSVKPMVLGRYIRHIQQKIVSKVYCATSLRWKDGCVVTKTKNFGGANKVRAESYIPAYLIPKQQPEVQWAWTNVPEYIKACLHRELRASLARLHFEEAGVSQSKENLARTADGAPVMPTRVSKRYMELVDWLVEKGITTEKEWLLENRESFRSFQASSNSARQIKTALQGAIQEMLLTKTAEDYLVGKDPVSDDDIRQNRIYKILELNHYDPAYVGSILVGWCQKKWGKRNTLWLFGHATTGKTNIAEAIAHAVPFYGCVNWTNENFPFNDCVEKMIIWWEEGKMTAKVVETAKAILGGSRVRVDQKCKASVPIEPTPVIITSNTNMCYVIDGNTTTFEHKQPLEDRMFKLELLTRLPDDFGKVTKQEVRQFFRWSQDHLTPVIPEFLVRKAESRKRPAPSGEGYISPTKRPALAEQQQASESADPVPTRLVGAVGQKGSECCS

SEQ ID NO: 543 - protein, 743 aa, Artificial Sequence
  Description of Artificial Sequence: Synthetic polypeptide
MSLISDAIPDWLERLVKKGVNAAADFYHLESGPPRPKANQQTQESLEKDDSRGLVFPGYNYLGPFNGLDKGEPVNEADAAALEHDKAYDLEIKDGHNPYFEYNEADRRFQERLKDDTSFGGNLGKAIFQAKKRVLEPFGLVEDSKTAPTGDKRKGEDEPRLPDTSSQTPKKNKKPRKERPSGGAEDPGEGTSSNAGAAAPASSVGSSIMAEGGGGPVGDAGQGADGVGNSSGNWHCDSQWLENGVVTRTTRTWVLPSYNNHLYKRIQGPSGGDNNNKFFGFSTPWGYFDYNRFHCHFSPRDWQRLINNNWGIRPKAMRFRLFNIQVKEVTVQDFNTTIGNNLTSTVQVFADKDYQLPYVLGSATEGTFPPFPADIYTIPQYGYCTLNYNNEAVDRSAFYCLDYFPSDMLRTGNNFEFTYTFEDVPFHSMFAHNQTLDRLMNPLVDQYLWAFSSVSQAGSSGRALHYSRATKTNMAAQYRNWLPGPFFRDQQIFTGASNITKNNVFSVWEKGKQWELDNRTNLMQPGPAAATTFSGEPDRQAMQNTLAFSRTVYDQTTATTDRNQILITNEDEIRPTNSVGIDAWGAVPTNNQSIVTPGTRAAVNNQGALPGMVWQNRDIYPTGTHLAKIPDTDNHFHPSPLIGRFGCKHPPPQIFIKNTPVPANPSETFQTAKVASFINQYSTGQCTVEIFWELKKETSKRWNPEIQFTSNFGNAADIQFAVSDTGSYSEPRPIGTRYLTKPL

SEQ ID NO: 544 - protein, 598 aa, Artificial Sequence
  Description of Artificial Sequence: Synthetic polypeptide
TAPTGDKRKGEDEPRLPDTSSQTPKKNKKPRKERPSGGAEDPGEGTSSNAGAAAPASSVGSSIMAEGGGGPVGDAGQGADGVGNSSGNWHCDSQWLENGVVTRTTRTWVLPSYNNHLYKRIQGPSGGDNNNKFFGFSTPWGYFDYNRFHCHFSPRDWQRLINNNWGIRPKAMRFRLFNIQVKEVTVQDFNTTIGNNLTSTVQVFADKDYQLPYVLGSATEGTFPPFPADIYTIPQYGYCTLNYNNEAVDRSAFYCLDYFPSDMLRTGNNFEFTYTFEDVPFHSMFAHNQTLDRLMNPLVDQYLWAFSSVSQAGSSGRALHYSRATKTNMAAQYRNWLPGPFFRDQQIFTGASNITKNNVFSVWEKGKQWELDNRTNLMQPGPAAATTFSGEPDRQAMQNTLAFSRTVYDQTTATTDRNQILITNEDEIRPTNSVGIDAWGAVPTNNQSIVTPGTRAAVNNQGALPGMVWQNRDIYPTGTHLAKIPDTDNHFHPSPLIGRFGCKHPPPQIFIKNTPVPANPSETFQTAKVASFINQYSTGQCTVEIFWELKKETSKRWNPEIQFTSNFGNAADIQFAVSDTGSYSEPRPIGTRYLTKPL

SEQ ID NO: 545 - DNA, 4694 bp, Artificial Sequence
  Description of Artificial Sequence: Synthetic polynucleotide
tggccagtttccaagacaggctcgctcgctcactcgggccggggccccaaaggggcccctagcgaccgcttcgcggtcgcggcccgagtgagcgagcgagcctgtcttggaaactggccagcactccggtgaggtaatgccgtcacgtggtcgggaatgggaacgggaaatctcgcgagaacgtaaacaaatataagacggcgccacacggcgctgcgtcatacgcgcgcgcgcaccggcgagatgaggtcgtactacgaggtcatcgttcagctgcccaacgacgtcgagagtcaggtacctggaatctccgattcgttcgtcaactggattacgtcgcgagaatggacgttgcctgaggacgccgattgggatttggaccaggtcgatcaagttcaactgacgctcggcgacaaaatccaacgggagattcgaactcattgggggacgatggccaaagaaccggactttcactattttatccaactggaacaaggtgaggtgttctttcatttacacgtcctgctggaaacgtgttccgtaaagccgatggtactcggaagatatatccgacatattcaacaaaaaattgtgagtaaagtctactgcgccacgagcctacgatggaaggatggatgcgtggtgaccaagaccaaaaatttcgggggcgcgaacaaggtccgggccgagtcgtatattcccgcctacctgatcccgaaacagcaaccggaagtgcagtgggcgtggactaacgtgcccgagtatataaaagcgtgcttgcaccgagaactgcgtgccagtctcgcgcgacttcacttcgaggaggcgggcgtctcgcaatccaaggaaaatctcgcgagaactgcagacggcgctcccgtgatgccgacccgcgtcagcaaacgctacatggagctcgtggattggctcgtggagaaggggatcaccaccgagaaggaatggctgctggaaaacagagaaagctttcggagctttcaggcctcgagcaactcggcgcgtcagatcaagacggccctgcaaggcgccattcaggagatgcttctgaccaagacggcggaggactacctcgtcggaaaggatcccgtctcggacgacgacatccgtcagaaccgcatctacaagattctggaactgaaccactacgacccagcgtacgtggggagtattttggtcgggtggtgccagaagaaatggggcaagcgaaacacgctgtggctgttcggacatgcgaccaccggcaagaccaacatcgcggaggctattgcccatgctgtgccgttctatggatgcgttaactggaccaacgagaactttccgttcaacgactgcgtcgaaaaaatgattatctggtgggaggagggcaaaatgaccgccaaagtggtggaaacagccaaggcgattctgggaggatctcgggtgagagtggaccaaaaatgcaaagcttcggttccgatcgaaccgacgccggtcattattaccagtaacaccaacatgtgttatgtcatcgacgggaacacgaccacgttcgagcataagcagccgttggaggacaggatgtttaagctcgaattgctgactcggttgcctgatgactttggtaaggtgaccaaacaggaggtgcgtcaattcttcaggtggtctcaggatcacctgacccctgtgatcccagaattcctagtgcggaaggcggagtctcgcaaaagacccgccccttccggggaaggctatataagcccgacaaagcggcccgcgctcgcagagcagcagcaggcgtcggagagcgcggacccggttcccaccaggtatcgtatcaaatgctcgaaacattgcggtatggataaaatgttgtttccttgccaaatttgtgaatcgatgaacagagatattaatatttgtgctattcataaaacgaccgactgtaaagagtgtttccccgactacggggataaagatgatgtagaactacccccctgtacagaacacaacgtgtctcgttgttatcaatgtcattcgggcgaattgtatcgcgtgacttcggactctgacgagaaacctgcccccgagagtgatgaaggcaccgagccatcctatgctccctgcacgattcaccacctgatgggcaagagtcacgggttagtcacttgcgcggcgtgtcggttgaaaaatagtacgttgcatgatgacttggatgacggtgatctcgaacaataaatgattgaaatgtagccatgtctctcatttctgatgcgattccagattggttggagcggttggtcaaaaagggagtgaatgctgcagctgatttctaccatttggaaagcggtcctcctcgtcctaaggcaaatcagcaaactcaagaatctcttgaaaaggacgattcgagaggtctcgtgttcccaggctacaattatctaggccctttcaacggtctagataaaggagaacccgtcaacgaggcagacgctgccgccttagaacacgacaaggcttacgacctcgaaatcaaggacgggcacaacccgtactttgagtacaacgaggccgacagacgtttccaggaacgtctcaaagacgatacctcctttggaggcaatttaggtaaagccatcttccaggccaaaaagagggttctcgaaccctttggtctggtggaagactcaaagacggctccgaccggagacaagcggaaaggcgaagacgaacctcgtttgcccgacacttcttcacagactcccaagaaaaacaagaagcctcgcaaggaaagaccttccggcggggcagaagatccgggcgaaggcacctcttccaacgctggagcagcagcacccgcctctagtgtgggatcatctatcatggctgaaggaggtggcggcccagtgggcgatgcaggccagggtgccgatggagtgggcaattcctccggaaattggcattgcgattcccaatggctggaaaacggagtcgtcactcgaaccacccgaacctgggtcttgcccagctacaacaaccacctgtacaaacgaatccaaggacccagcggaggcgacaacaacaacaaattctttggattcagcaccccctggggatactttgactacaatcgattccactgccacttttccccgcgagactggcaacgactcatcaacaacaactggggcatccgtcccaaagcgatgcgctttagactctttaacatccaggttaaagaggtcacggtccaagacttcaacaccaccatcggcaacaacctcaccagtacggtccaggtctttgcggacaaggactaccaactgccgtacgtcctcggatcggctaccgaaggcaccttcccgccgttcccagcggatatctacacgatcccgcagtacgggtactgcacgctaaactacaacaacgaggcggtggatcgttcggccttctactgtctggactactttccctcagacatgctgcggacaggaaataactttgagtttacttacaccttcgaggacgttcctttccatagcatgtttgcccacaaccagacgctagaccggctgatgaatcccctcgtggatcagtacctctgggctttcagctccgtcagccaagcaggctcatctggacgagctcttcattactcgcgggcgactaaaaccaacatggcggctcaatataggaactggttacctgggcctttcttccgtgatcagcaaatctttacgggcgctagcaacatcactaaaaataacgtctttagcgtttgggaaaaaggcaagcaatgggaactcgacaatcggaccaacctaatgcagcccggtcctgcggcagcgaccacctttagcggagaacctgaccgtcaagccatgcaaaacacgctggcttttagcaggaccgtctacgatcaaacgaccgccacgaccgatcgtaaccagatactcatcaccaacgaagacgaaatcagacccaccaactcggtcggtatcgacgcgtggggagcagttcccaccaacaaccagtcgatcgtgacccccggcactcgcgcggccgtcaacaatcaaggggcgcttcccgggatggtgtggcaaaacagagacatttaccctacagggacccatttggccaaaattcccgacactgacaatcacttccatccgtccccgcttattgggcggtttggctgcaagcatccccctccccagattttcattaaaaacacacccgtccctgccaacccttcggaaacgttccagacggccaaagtggcctccttcatcaaccagtactcgaccggacagtgcaccgtcgaaatcttttgggaactcaagaaggaaacctccaagcgctggaaccccgaaatccagttcacctccaactttggcaacgcggccgacatccagtttgccgtctccgacacgggatcctattccgaacctcgtcccatcggtacccgttaccttaccaaacctctgtaaattaaacccttcaataaaccgtttatgcgtaactgtatttccgtctcctgtcgttattcagtcacatgatgcggcattacctcaccggagtgctggccagtttccaagacaggctcgctcgctcactcgggccggggccccaaaggggcccctagcgaccgcttcgcggtcgcggcccgagtgagcgagcgagcctgtcttggaaactggcca

SEQ ID NO: 546 - DNA, 2211 bp, Artificial Sequence
  Description of Artificial Sequence: Synthetic polynucleotide
atggctgctgatggttatcttccagattggctcgaggacactctctctgaaggaataagacagtggtggaagctcaaacctggcccaccaccaccaaagcccgcagagcggcataaggacgacagcaggggtcttgtgcttcctgggtacaagtacctcggacccttcaacggactcgacaagggagagccggtcaacgaggcagacgcagcggccctcgagcacgacaaggcctacgaccagcagctcaaggccggtgacaacccctacctcaagtacaaccacgccgacgcggagttccagcagcggcttcagggcgacacatcgtttgggggcaacctcggcagagcagtcttccaggccaaaaagagggttcttgaacctcttggtctggttgagcaagcgggtgagacggctcctggaaagaagagaccgttgattgaatccccccagcagcccgactcctccacgggtatcggcaaaaaaggcaagcagccggctaaaaagagactcaattttggtcagactggcgactcagagtcagtccccgacccacaacctctcggagaacctccagcaacccccgctgctgtgggacctactacaatggcttcaggtggtggcgcaccaatggcagacaataacgaaggcgccgacggagtgggtaatgcctcaggaaattggcattgcgattccacatggctgggcgacagagtcatcaccaccagcacccgcacctgggccttgcccacctacaataaccacctctacaagcaaatctccagtgcttcaacgggggccagcaacgacaaccactacttcggctacagcaccccctgggggtattttgacttcaacagattccactgccacttttcaccacgtgactggcagcgactcatcaacaacaattggggattccggcccaagagactcaacttcaaactcttcaacatccaagtcaaggaggtcacgacgaatgatggcgtcacaaccatcgctaataaccttaccagcacggttcaagtcttctcggactcagactatcagctcccgtacgtgctcgggtcggctcacgagggctgcctcccgccgttcccagcagacgtcttcatggtgccacagtatggatacctcaccctgaacaacgggagtcaggcagtaggacgctcttcattttactgcctggagtactttccttctcagatgctgcgtaccggaaacaactttaccttcagctacacttttgaggacgttcctttccacagcagctacgctcacagccagagtctggaccgtctcatgaatcctctcatcgaccagtacctgtattacctgaacagaactcagaatcagtccggaagtgcccaaaacaaggacttgctgtttagccgggggtctccagctggcatgtctgttcagcccaaaaactggctacctggaccctgttatcggcagcagcgcgtttctaaaacaaaaacagacaacaacaacagcaactttacctggactggtgcttcaaaatataaccttaatgggcgtgaatctataatcaaccctggcactgctatggcctcacacaaagacgacaaagacaagttctttcccatgagcggtgtcatgatttttggaaaggagagcgccggagcttcaaacactgcattggacaatgtcatgatcacagacgaagaggaaatcaaagccactaaccccgtggccaccgaaagatttgggactgtggcagtcaatctccagagcagcagcacagaccctgcgaccggagatgtgcatgttatgggagccttacctggaatggtgtggcaagacagagacgtatacctgcagggtcccatttgggccaaaattcctcacacagatggacactttcacccgtctcctcttatgggcggctttggactcaagaacccgcctcctcagatcctcatcaaaaacacgcctgttcctgcgaatcctccggcggagttttcagctacaaagtttgcttcattcatcacccaatactccacaggacaagtgagtgtggaaattgaatgggagctgcagaaagaaaacagcaagcgctggaatcccgaagtgcagtacacatccaattatgcaaaatctgccaacgttgattttactgtggacaacaatggactttatactgagcctcgccccattggcacccgttacctcacccgtcccctgtaa

SEQ ID NO: 547 - protein, 736 aa, Artificial Sequence
  Description of Artificial Sequence: Synthetic polypeptide
MAADGYLPDWLEDTLSEGIRQWWKLKPGPPPPKPAERHKDDSRGLVLPGYKYLGPFNGLDKGEPVNEADAAALEHDKAYDQQLKAGDNPYLKYNHADAEFQQRLQGDTSFGGNLGRAVFQAKKRVLEPLGLVEQAGETAPGKKRPLIESPQQPDSSTGIGKKGKQPAKKRLNFGQTGDSESVPDPQPLGEPPATPAAVGPTTMASGGGAPMADNNEGADGVGNASGNWHCDSTWLGDRVITTSTRTWALPTYNNHLYKQISSASTGASNDNHYFGYSTPWGYFDFNRFHCHFSPRDWQRLINNNWGFRPKRLNFKLFNIQVKEVTTNDGVTTIANNLTSTVQVFSDSDYQLPYVLGSAHEGCLPPFPADVFMVPQYGYLTLNNGSQAVGRSSFYCLEYFPSQMLRTGNNFTFSYTFEDVPFHSSYAHSQSLDRLMNPLIDQYLYYLNRTQNQSGSAQNKDLLFSRGSPAGMSVQPKNWLPGPCYRQQRVSKTKTDNNNSNFTWTGASKYNLNGRESIINPGTAMASHKDDKDKFFPMSGVMIFGKESAGASNTALDNVMITDEEEIKATNPVATERFGTVAVNLQSSSTDPATGDVHVMGALPGMVWQDRDVYLQGPIWAKIPHTDGHFHPSPLMGGFGLKNPPPQILIKNTPVPANPPAEFSATKFASFITQYSTGQVSVEIEWELQKENSKRWNPEVQYTSNYAKSANVDFTVDNNGLYTEPRPIGTRYLTRPL

SEQ ID NO: 548 - DNA, 2211 bp, Artificial Sequence
  Description of Artificial Sequence: Synthetic polynucleotide
atggcttccgatggttatcttccagattggctcgaggacaacctctctgagggcatccgcgagtggtgggacttgaaacctggagccccgaaacccaaagccaaccagcaaaagcaggacgacggccggggtctggtgcttcctggctacaagtacctcggacccttcaacggactcgacaagggggagcccgtcaacgcggcggatgcagcggccctcgagcacgacaaggcctacgaccagcagctcagagcgggtgacaatccgtacctgcggtataaccacgccgacgccgagtttcaggagcgtctgcaagaagatacgtcttttgggggcaacctcgggcgagcagtcttccaggccaagaagagggttctcgaaccttttggtctggttgaggaaggtgctaagacggctcctggaaagaaacgtccggtagagcagtcgccacaagagccagactcctcctcgggcattggcaagacaggccagcagcccgctaaaaagagactcaattttggtcagactggcgactcagagtcagtccccgacccacaacctctcggagaacctccagcaacccccgctgctgtgggacctactacaatggcttcaggcggtggcgcaccaatggcagacaataacgaaggcgccgacggagtgggtaatgcctcaggaaattggcattgcgattccacatggctgggcgacagagtcatcaccaccagcacccgaacatgggccttgcccacctataacaaccacctctacaagcaaatctccagtgcttcaacgggggccagcaacgacaaccactacttcggctacagcaccccctgggggtattttgatttcaacagattccactgccatttctcaccacgtgactggcagcgactcatcaacaacaattggggattccggcccaagagactcaacttcaaactcttcaacatccaagtcaaggaggtcacgacgaatgatggcgtcacaaccatcgctaataaccttaccagcacggttcaagtcttctcggactcggagtaccagcttccgtacgtcctcggctctgcgcaccagggctgcctccctccgttcccggcggacgtgttcatgattccgcagtacggctacctaacgctcaacaatggcagccaggcagtgggacggtcatccttttactgcctggaatatttcccatcgcagatgctgagaacgggcaataactttaccttcagctacaccttcgaggacgtgcctttccacagcagctacgcgcacagccagagcctggaccggctgatgaatcctctcatcgaccagtacctgtattacctgaacagaactcagaatcagtccggaagtgcccaaaacaaggacttgctgtttagccgggggtctccagctggcatgtctgttcagcccaaaaactggctacctggaccctgttaccggcagcagcgcgtttctaaaacaaaaacagacaacaacaacagcaactttacctggactggtgcttcaaaatataaccttaatgggcgtgaatctataatcaaccctggcactgctatggcctcacacaaagacgacaaagacaagttctttcccatgagcggtgtcatgatttttggaaaggagagcgccggagcttcaaacactgcattggacaatgtcatgatcacagacgaagaggaaatcaaagccactaaccccgtggccaccgaaagatttgggactgtggcagtcaatctccagagcagcagcacagaccctgcgaccggagatgtgcatgttatgggagccttacctggaatggtgtggcaagacagagacgtatacctgcagggtcccatttgggccaaaattcctcacacagatggacactttcacccgtctcctcttatgggcggctttggacttaagcacccgcctcctcagatcctcatcaaaaacacgcctgttcctgcgaatcctccggcagagttttcggctacaaagtttgcttcattcatcacccagtattctactggccaagtcagcgtggagattgaatgggagctgcagaaagaaaacagcaaacgctggaatcccgaagtgcagtatacatctaactatgcaaaatctgccaacgttgatttcactgtggacaacaatggactttatactgagcctcgtcccattggcacccgttacctcacccgtcccctgtaa

SEQ ID NO: 549 - protein, 736 aa, Artificial Sequence
  Description of Artificial Sequence: Synthetic polypeptide
MASDGYLPDWLEDNLSEGIREWWDLKPGAPKPKANQQKQDDGRGLVLPGYKYLGPFNGLDKGEPVNAADAAALEHDKAYDQQLRAGDNPYLRYNHADAEFQERLQEDTSFGGNLGRAVFQAKKRVLEPFGLVEEGAKTAPGKKRPVEQSPQEPDSSSGIGKTGQQPAKKRLNFGQTGDSESVPDPQPLGEPPATPAAVGPTTMASGGGAPMADNNEGADGVGNASGNWHCDSTWLGDRVITTSTRTWALPTYNNHLYKQISSASTGASNDNHYFGYSTPWGYFDFNRFHCHFSPRDWQRLINNNWGFRPKRLNFKLFNIQVKEVTTNDGVTTIANNLTSTVQVFSDSEYQLPYVLGSAHQGCLPPFPADVFMIPQYGYLTLNNGSQAVGRSSFYCLEYFPSQMLRTGNNFTFSYTFEDVPFHSSYAHSQSLDRLMNPLIDQYLYYLNRTQNQSGSAQNKDLLFSRGSPAGMSVQPKNWLPGPCYRQQRVSKTKTDNNNSNFTWTGASKYNLNGRESIINPGTAMASHKDDKDKFFPMSGVMIFGKESAGASNTALDNVMITDEEEIKATNPVATERFGTVAVNLQSSSTDPATGDVHVMGALPGMVWQDRDVYLQGPIWAKIPHTDGHFHPSPLMGGFGLKHPPPQILIKNTPVPANPPAEFSATKFASFITQYSTGQVSVEIEWELQKENSKRWNPEVQYTSNYAKSANVDFTVDNNGLYTEPRPIGTRYLTRPL

SEQ ID NO: 550 - DNA, 2211 bp, Artificial Sequence
  Description of Artificial Sequence: Synthetic polynucleotide
atggctgctgatggttatcttccagattggctcgaggacactctctctgaaggaataagacagtggtggaagctcaaacctggcccaccaccaccaaagcccgcagagcggcataaggacgacagcaggggtcttgtgcttcctgggtacaagtacctcggacccttcaacggactcgacaagggagagccggtcaacgaggcagacgcagcggccctcgagcacgacaaggcctacgaccagcagctcaaggccggtgacaacccctacctcaagtacaaccacgccgacgcggagttccagcagcggcttcagggcgacacatcgtttgggggcaacctcggcagagcagtcttccaggccaaaaagagggttcttgaacctcttggtctggttgagcaagcgggtgagacggctcctggaaagaagagaccgttgattgaatccccccagcagcccgactcctccacgggtatcggcaaaaaaggcaagcagccggctaaaaagagactcaattttggtcagactggcgactcagagtcagtccccgacccacaacctctcggagaacctccagcaacccccgctgctgtgggacctactacaatggcttcaggtggtggcgcaccaatggcagacaataacgaaggcgccgacggagtgggtaatgcctcaggaaattggcattgcgattccacatggctgggcgacagagtcatcaccaccagcacccgcacctgggccttgcccacctacaataaccacctctacaagcaaatctccagtgcttcaacgggggccagcaacgacaaccactacttcggctacagcaccccctgggggtattttgacttcaacagattccactgccacttttcaccacgtgactggcagcgactcatcaacaacaattggggattccggcccaagagactcaacttcaaactcttcaacatccaagtcaaggaggtcacgacgaatgatggcgtcacaaccatcgctaataaccttaccagcacggttcaagtcttctcggactcagactatcagctcccgtacgtgctcgggtcggctcacgagggctgcctcccgccgttcccagcagacgtcttcatggtgccacagtatggatacctcaccctgaacaacgggagtcaggcagtaggacgctcttcattttactgcctggagtactttccttctcagatgctgcgtaccggaaacaactttaccttcagctacacttttgaggacgttcctttccacagcagctacgctcacagccagagtctggaccgtctcatgaatcctctcatcgaccagtacctgtattacctgaacagaactcagaatcagtccggaagtgcccaaaacaaggacttgctgtttagccgggggtctccaactggcatgtctgttcagcccaaaaactggctacctggaccctgttatcggcagcagcgcgtttctaaaacaaaaacagacaacaacaacagcaactttacctggactggtgcttcaaaatataaccttaatgggcgtgaatctataatcaaccctggcactgctatggcctcacacaaagacgacaaagacaagttctttcccatgagcggtgtcatgatttttggaaaggagagcgccggagcttcaaacactgcattggacaatgtcatgatcacagacgaagaggaaatcaaagccactaaccccgtggccactgaaagatttgggactgtggcagtcaatctccagagcagcagcacagaccctgcgaccggagatgtgcatgccatgggagccttacctggaatggtgtggcaagacagagacgtatacctgcagggtcctatttgggccaaaattcctcacacggatggacactttcacccgtctcctctcatgggcggctttggactcaagaacccgcctcctcagatcctcatcaaaaacacgcctgttcctgcgaatcctccggcggagttttcagctacaaagtttgcttcattcatcacccagtattccacaggacaagtgagcgtggagattgaatgggagctgcagaaagaaaacagcaaacgctggaatcccgaagtgcagtatacatctaactatgcaaaatctgccaacgttgatttcactgtggacaacaatggactttatactgagcctcgccccattggcacccgttacctcacccgtcccctgtaa

SEQ ID NO: 551 - protein, 736 aa, Artificial Sequence
  Description of Artificial Sequence: Synthetic polypeptide
MAADGYLPDWLEDTLSEGIRQWWKLKPGPPPPKPAERHKDDSRGLVLPGYKYLGPFNGLDKGEPVNEADAAALEHDKAYDQQLKAGDNPYLKYNHADAEFQQRLQGDTSFGGNLGRAVFQAKKRVLEPLGLVEQAGETAPGKKRPLIESPQQPDSSTGIGKKGKQPAKKRLNFGQTGDSESVPDPQPLGEPPATPAAVGPTTMASGGGAPMADNNEGADGVGNASGNWHCDSTWLGDRVITTSTRTWALPTYNNHLYKQISSASTGASNDNHYFGYSTPWGYFDFNRFHCHFSPRDWQRLINNNWGFRPKRLNFKLFNIQVKEVTTNDGVTTIANNLTSTVQVFSDSDYQLPYVLGSAHEGCLPPFPADVFMVPQYGYLTLNNGSQAVGRSSFYCLEYFPSQMLRTGNNFTFSYTFEDVPFHSSYAHSQSLDRLMNPLIDQYLYYLNRTQNQSGSAQNKDLLFSRGSPTGMSVQPKNWLPGPCYRQQRVSKTKTDNNNSNFTWTGASKYNLNGRESIINPGTAMASHKDDKDKFFPMSGVMIFGKESAGASNTALDNVMITDEEEIKATNPVATERFGTVAVNLQSSSTDPATGDVHAMGALPGMVWQDRDVYLQGPIWAKIPHTDGHFHPSPLMGGFGLKNPPPQILIKNTPVPANPPAEFSATKFASFITQYSTGQVSVEIEWELQKENSKRWNPEVQYTSNYAKSANVDFTVDNNGLYTEPRPIGTRYLTRPL

SEQ ID NO: 552 - DNA, 2211 bp, Artificial Sequence
  Description of Artificial Sequence: Synthetic polynucleotide
atggctgccgatggttatcttccagattggctcgaggacaacctctctgagggcattcgcgagtggtgggcgctgaaacctggagccccgaagcccaaagccaaccagcaaaagcaggacgacggccggggtctggtgcttcctggctacaagtacctcggacccttcaacggactcgacaagggggagcccgtcaacgcggcggatgcagcggccctcgagcacgacaaggcctacgaccagcagctcaaagcgggtgacaatccgtacctgcggtataaccacgccgacgccgagtttcaggagcgtctgcaagaagatacgtcttttgggggcaacctcgggcgagcagtcttccaggccaagaagcgggttctcgaacctctcggtctggttgaggaaggcgctaagacggctcctggaaagaaacgtccggtagagcaatcgccacaagagccagactcctcctcgggcatcggcaagacaggccagcagcccgctaaaaagagactcaattttggtcagactggcgactcagagtcagtccccgacccacaacctctcggagaacctccagcaacccccgctgctgtgggacctactacaatggcttcaggcggtggcgcaccaatggcagacaataacgaaggcgccgacggagtgggtaatgcctcaggaaattggcattgcgattccacatggctgggcgacagagtcatcaccaccagcacccgaacatgggccttgcccacctataacaaccacctctacaagcaaatctccagtgcttcgacgggggccagcaacgacaaccactacttcggctacagcaccccctgggggtattttgactttaacagattccactgccacttttcaccacgtgactggcagcgactcatcaacaacaactggggattccggcccaagagactcagcttcaagctcttcaacatccaggtcaaggaggtcacgacgaatgatggcgtcacaaccatcgctaataaccttaccagcacggttcaagtcttctcggactcggagtaccagcttccgtacgtcctcggctctgcgcaccagggctgcctccctccgttcccggcggacgtgttcatgattccgcaatacggctacctgacgctcaacaatggcagccaagccgtgggacgttcatccttttactgcctggaatatttcccttctcagatgctgagaacgggcaacaactttaccttcagctacacctttgaggaagtgcctttccacagcagctacgcgcacagccagagcctggaccggctgatgaatcctctcatcgatcaatacctgtattacctgaacagaactcaaaatcagtccggaagtgcccaaaacaaggacttgctgtttagccgtgggtctccagctggcatgtctgttcagcccaaaaactggctacctggaccctgttatcggcagcagcgcgtttctaaaacaaaaacagacaacaacaacagcaattttacctggactggtgcttcaaaatataacctcaatgggcgtgaatccatcatcaaccctggcactgctatggcctcacataaagacgacgaagacaagttctttcccatgagcggtgtcatgatttttggaaaagagagcgccggagcttcaaacactgcattggacaatgtcatgattacagacgaagaggaaattaaagccactaaccctgtggccaccgaaagatttgggaccgtggcagtcaatttccagagcagcagcacagaccctgcgaccggagatgtgcatgctatgggagcattacctggcatggtgtggcaagatagagacgtgtacctgcagggtcccatttgggccaaaattcctcacacagatggacactttcacccgtctcctcttatgggcggctttggactcaagaacccgcctcctcagatcctcatcaaaaacacgcctgttcctgcgaatcctccggcggagttttcagctacaaagtttgcttcattcatcacccaatactccacaggacaagtgagcgtggagattgaatgggagctgcagaaagaaaacagcaaacgctggaatcccgaagtgcagtatacatctaactatgcaaaatctgccaacattgatttcactgtggacaacaatggactttatactgagcctcgccccattggcacccgttacctcacccgtccccagtaa

SEQ ID NO: 553 - protein, 736 aa, Artificial Sequence
  Description of Artificial Sequence: Synthetic polypeptide
MAADGYLPDWLEDNLSEGIREWWALKPGAPKPKANQQKQDDGRGLVLPGYKYLGPFNGLDKGEPVNAADAAALEHDKAYDQQLKAGDNPYLRYNHADAEFQERLQEDTSFGGNLGRAVFQAKKRVLEPLGLVEEGAKTAPGKKRPVEQSPQEPDSSSGIGKTGQQPAKKRLNFGQTGDSESVPDPQPLGEPPATPAAVGPTTMASGGGAPMADNNEGADGVGNASGNWHCDSTWLGDRVITTSTRTWALPTYNNHLYKQISSASTGASNDNHYFGYSTPWGYFDFNRFHCHFSPRDWQRLINNNWGFRPKRLSFKLFNIQVKEVTTNDGVTTIANNLTSTVQVFSDSEYQLPYVLGSAHQGCLPPFPADVFMIPQYGYLTLNNGSQAVGRSSFYCLEYFPSQMLRTGNNFTFSYTFEEVPFHSSYAHSQSLDRLMNPLIDQYLYYLNRTQNQSGSAQNKDLLFSRGSPAGMSVQPKNWLPGPCYRQQRVSKTKTDNNNSNFTWTGASKYNLNGRESIINPGTAMASHKDDEDKFFPMSGVMIFGKESAGASNTALDNVMITDEEEIKATNPVATERFGTVAVNFQSSSTDPATGDVHAMGALPGMVWQDRDVYLQGPIWAKIPHTDGHFHPSPLMGGFGLKNPPPQILIKNTPVPANPPAEFSATKFASFITQYSTGQVSVEIEWELQKENSKRWNPEVQYTSNYAKSANIDFTVDNNGLYTEPRPIGTRYLTRPQ

SEQ ID NO: 554 - DNA, 2211 bp, Artificial Sequence
  Description of Artificial Sequence: Synthetic polynucleotide
atggctgccgatggttatcttccagattggctcgaggacaacctctctgagggcattcgcgagtggtgggacttgaaacctggagccccgaaacccaaagccaaccagcaaaagcaggacgacggccggggtctggtgcttcctggctacaagtacctcggacccttcaacggactcgacaagggggagcccgtcaacgcggcggatgcagcggccctcgagcacgacaaggcctacgaccagcagctcaaagcgggtgacaatccgtaccttcggtataaccacgccgacgccgagtttcaggagcgtctgcaagaagatacgtcttttgggggcaacctcgggcgagcagtcttccaggccaaaaagagggttctcgaacctctcggtctggttgaggaagcggctaagacggctcctggaaagaaacgtccggtagagcagtcgccacaagagccagactcctcctcgggcattggcaagacaggccagcagcccgctaaaaagagactcaattttggtcagactggcgactcagagtcagtccccgacccacaacctctcggagaacctcccgcagccccctcaggtgtgggatctcttacaatggcttcaggtggtggcgcaccaatggcagacaataacgaaggcgccgacggagtgggtaatgcctcaggaaattggcattgcgattccacatggctgggcgacagagtcatcaccaccagcacccgcacctgggccttgcccacctacaataaccacctctacaagcaaatctccagtgcttcaacgggggccagcaacgacaaccactacttcggctacagcaccccctgggggtattttgacttcaacagattccactgccacttttcaccacgtgactggcaaagactcatcaacaacaattggggattccggcccaagagactcaacttcaagctcttcaacatccaagtcaaggaggtcacgacgaatgatggcgtcacgaccatcgctaataaccttaccagcacggttcaagtcttctcggactcggagtaccagttgccgtacgtcctcggctctgcgcaccagggctgcctccctccgttcccggcggacgtgttcatgattccgcagtacggctacctaacgctcaacaatggcagccaggcagtgggacggtcatccttttactgcctggaatatttcccatcgcagatgctgagaacgggcaacaactttaccttcagctacacctttgaggaagtgcctttccacagcagctacgcgcacagccagagcctggaccggctgatgaatcctctcatcgaccagtacctgtattacctgaacagaactcaaaatcagtccggaagtgcccaaaacaaggacttgctgtttagccgtgggtctccagctggcatgtctgttcagcccaaaaactggctacctggaccctgttaccggcagcagtgcgtttctaaaacaaaaacagacaacaacaacagcaactttacctggactggtgcttcaaaatataaccttaatgggcgtgaatctataatcaaccctggcactgctatggcctcacacaaagacgacaaagacaagttctttcccatgagcggtgtcatgatttttggaaaggagagcgccggagcttcaaacactgcattggacaatgtcatgatcacagacgaagaggaaatcaaagccactaaccccgtggccaccgaaagatttgggactgtggcagtcaatctccagagcagcagcacagaccctgcgaccggagatgtgcatgttatgggagccttacctggaatggtgtggcaagacagagacgtatacctgcagggtcctatttgggccaaaattcctcacacagatggacactttcacccgtctcctcttatgggcggctttggactcaagaacccgcctcctcagatcctcatcaaaaacacgcctgttcctgcgaatcctccggcggagttttcagctacaaagtttgcttcattcatcacccaatactccacaggacaagtgagcgtggagattgaatgggagctgcagaaagaaaacagcaagcgctggaatcccgaagtgcagtacacatccaattatgcaaaatctgccaacgttgatttcactgtggacaacaatggactttatactgagcctcgccccattggcacccgttacctcacccgtcccctgtaa

SEQ ID NO: 555 - protein, 736 aa, Artificial Sequence
  Description of Artificial Sequence: Synthetic polypeptide
MAADGYLPDWLEDNLSEGIREWWDLKPGAPKPKANQQKQDDGRGLVLPGYKYLGPFNGLDKGEPVNAADAAALEHDKAYDQQLKAGDNPYLRYNHADAEFQERLQEDTSFGGNLGRAVFQAKKRVLEPLGLVEEAAKTAPGKKRPVEQSPQEPDSSSGIGKTGQQPAKKRLNFGQTGDSESVPDPQPLGEPPAAPSGVGSLTMASGGGAPMADNNEGADGVGNASGNWHCDSTWLGDRVITTSTRTWALPTYNNHLYKQISSASTGASNDNHYFGYSTPWGYFDFNRFHCHFSPRDWQRLINNNWGFRPKRLNFKLFNIQVKEVTTNDGVTTIANNLTSTVQVFSDSEYQLPYVLGSAHQGCLPPFPADVFMIPQYGYLTLNNGSQAVGRSSFYCLEYFPSQMLRTGNNFTFSYTFEEVPFHSSYAHSQSLDRLMNPLIDQYLYYLNRTQNQSGSAQNKDLLFSRGSPAGMSVQPKNWLPGPCYRQQCVSKTKTDNNNSNFTWTGASKYNLNGRESIINPGTAMASHKDDKDKFFPMSGVMIFGKESAGASNTALDNVMITDEEEIKATNPVATERFGTVAVNLQSSSTDPATGDVHVMGALPGMVWQDRDVYLQGPIWAKIPHTDGHFHPSPLMGGFGLKNPPPQILIKNTPVPANPPAEFSATKFASFITQYSTGQVSVEIEWELQKENSKRWNPEVQYTSNYAKSANVDFTVDNNGLYTEPRPIGTRYLTRPL

SEQ ID NO: 556 - DNA, 2211 bp, Artificial Sequence
  Description of Artificial Sequence: Synthetic polynucleotide
atggctgccgatggttatcttccagattggctcgaggacaacctctctgagggcattcgcgaatggtgggacttgaaacctggagccccgaaacccaaagtcaaccagcaaaagcaggacaacgctcggggtcttgtgcttccgggttacaaatacctcggacccttcaacggactcgacaagggggagcccgtcaacgcggcggacgcagcggccctcgagcacgacaaggcctacgaccagcagctcaaagcgggtgacaatccgtaccttcggtataaccacgccgacgccgagtttcaggagcgtctgcaagaagatacgtcttttgggggcaaccttggacgagcagtcttccaggccaagaagagggttctcgaaccttttggtctggttgaggaaggtgctaagacggctcctggaaagaaacgtccggtagagcagtcgccacaagagccagactcctcctcgggcattggcaagacaggccagcagcccgctaaaaagagactcaattttggtcagactggcgactcagagtcagtccccgacccacaacctctcggagaacctccagcaacccccgctgctgtgggacctactacaatggcttcaggcggtggcgcaccaatggcagacaataacgaaggcgccgacggagtgggtaatgcctcaggaaattggcattgcgattccacatggctgggcgacagagtcatcaccaccagcacccgcacctgggccttgcccacctacaataaccacctctacaagcaaatctccagtgcttcaacgggggccagcaacgacaaccactacttcggctacagcaccccctgggggtattttgacttcaacagattccactgccacttttcaccacgtgactggcaaagactcatcaacaacaattggggattccggcccaagagactcaacttcaagctcttcaacatccaagtcaaggaggtcacgacgaatgatggcgtcacgaccatcgctaataaccttaccagcacggttcaagtcttctcggactcggagtaccagttgccgtacgtcctcggctctgcgcaccagggctgcctccctccgttcccggcggacgtgttcatgattccgcaatacggctacctgacgctcaacaatggcagccaggcagtgggacggtcatccttttactgcctggaatatttcccatcgcagatgctgagaacgggcaataactttaccttcagctacacttttgaggacgttcctttccacagcagctacgctcacagccagagcctggaccggctgatgaatcctctcatcgaccagtacctgtattacctgaacagaactcagaatcagtccggaagtgcccaaaacaaggacttgctgtttagccgtgggtctccaactggcatgtctgttcagcccaaaaactggctacctggaccctgttatcggcagcagcgcgtttctaaaacaaaaacagacaacaacaacagcaactttacctggactggtgcttcaaaatataaccttaatgggcgtgaatctataatcaaccctggcactgctatggcctcacacaaagacgacgaagacaagttctttcccatgagcggtgtcatgatttttggaaaggagagcgccggagcttcaaacactgcattggacaatgtcatgatcacagacgaagaggaaatcaaagccactaaccccgtggccactgaaagatttgggactgtggcagtcaatctccagagcagcagcacagaccctgcgaccggagatgtgcatgccatgggagccttacctggaatggtgtggcaagacagagacgtatacctgcagggtcctatttgggccaaaattcctcacacggatggacactttcacccgtctcctctcatgggcggctttggacttaagcacccgcctcctcagatcctcatcaaaaacacgcctgttcctgcgaatcctccggcagagttttcggctacaaagtttgcttcattcatcacccagtattccacaggacaagtgagcgtggagattgaatgggagctgcagaaagaaaacagcaaacgctggaatcccgaagtgcagtatacatctaactatgcaaaatctgccaacgttgatttcactgtggacaacaatggactttatactgagcctcgccccattggcacccgttacctcacccgtcccctgtaa

SEQ ID NO: 557 - protein, 736 aa, Artificial Sequence
  Description of Artificial Sequence: Synthetic polypeptide
MAADGYLPDWLEDNLSEGIREWWDLKPGAPKPKVNQQKQDNARGLVLPGYKYLGPFNGLDKGEPVNAADAAALEHDKAYDQQLKAGDNPYLRYNHADAEFQERLQEDTSFGGNLGRAVFQAKKRVLEPFGLVEEGAKTAPGKKRPVEQSPQEPDSSSGIGKTGQQPAKKRLNFGQTGDSESVPDPQPLGEPPATPAAVGPTTMASGGGAPMADNNEGADGVGNASGNWHCDSTWLGDRVITTSTRTWALPTYNNHLYKQISSASTGASNDNHYFGYSTPWGYFDFNRFHCHFSPRDWQRLINNNWGFRPKRLNFKLFNIQVKEVTTNDGVTTIANNLTSTVQVFSDSEYQLPYVLGSAHQGCLPPFPADVFMIPQYGYLTLNNGSQAVGRSSFYCLEYFPSQMLRTGNNFTFSYTFEDVPFHSSYAHSQSLDRLMNPLIDQYLYYLNRTQNQSGSAQNKDLLFSRGSPTGMSVQPKNWLPGPCYRQQRVSKTKTDNNNSNFTWTGASKYNLNGRESIINPGTAMASHKDDEDKFFPMSGVMIFGKESAGASNTALDNVMITDEEEIKATNPVATERFGTVAVNLQSSSTDPATGDVHAMGALPGMVWQDRDVYLQGPIWAKIPHTDGHFHPSPLMGGFGLKHPPPQILIKNTPVPANPPAEFSATKFASFITQYSTGQVSVEIEWELQKENSKRWNPEVQYTSNYAKSANVDFTVDNNGLYTEPRPIGTRYLTRPL

SEQ ID NO: 558 - DNA, 2208 bp, Artificial Sequence
  Description of Artificial Sequence: Synthetic polynucleotide
  modified_base (955)..(955): n = a, c, t, or g
  misc_feature (955)..(955): n is a, c, g, or t
  modified_base (971)..(972): n = a, c, t, or g
  misc_feature (971)..(972): n is a, c, g, or t
  modified_base (981)..(981): n = a, c, t, or g
  misc_feature (981)..(981): n is a, c, g, or t
  modified_base (986)..(986): n = a, c, t, or g
  misc_feature (986)..(986): n is a, c, g, or t
  modified_base (1235)..(1235): n = a, c, t, or g
  misc_feature (1235)..(1235): n is a, c, g, or t
  modified_base (1694)..(1696): n = a, c, t, or g
  misc_feature (1694)..(1696): n is a, c, g, or t
  modified_base (1698)..(1698): n = a, c, t, or g
  misc_feature (1698)..(1698): n is a, c, g, or t
  modified_base (1763)..(1765): n = a, c, t, or g
  misc_feature (1763)..(1765): n is a, c, g, or t
  modified_base (1778)..(1778): n = a, c, t, or g
  misc_feature (1778)..(1778): n is a, c, g, or t
  modified_base (2204)..(2204): n = a, c, t, or g
  misc_feature (2204)..(2204): n is a, c, g, or t
atggctgccgatggttatcttccagattggctcgaggacaacctctctgagggcattcgcgaatggtgggacttgaaacctggagccccgaaacccaaagtcaaccagcaaaagcaggacaacgctcggggtcttgtgcttccgggttacaaatacctcggacccttcaacggactcgacaagggggagcccgtcaacgcggcggacgcagcggccctcgagcacgacaaggcctacgaccagcagctcaaagcgggtgacaatccgtaccttcggtataaccacgccgacgccgagtttcaggagcgtctgcaagaagatacgtcttttgggggcaaccttggacgagcagtcttccaggccaagaagagggttctcgaaccttttggtctggttgaggaaggtgctaagacggctcctggaaagaaacgtccggtagagcagtcgccacaagagccagactcctcctcgggcattggcaagacaggccagcagcccgctaaaaagagactcaattttggtcagactggcgactcagagtcagtccccgacccacaacctctcggagaacctccagcaacccccgctgctgtgggacctactacaatggcttcaggcggtggcgcaccaatggcagacaataacgaaggcgccgacggagtgggtaatgcctcaggaaattggcattgcgattccacatggctgggcgacagagtcatcaccaccagcacccgaacatgggccttgcccacctataacaaccacctctacaagcaaatctccagtgcttcaacgggggccagcaacgacaaccactacttcggctacagcaccccctgggggtattttgatttcaacagattccactgccacttttcaccacgtgactggcagcgactcatcaataacaattggggattccggcccaagagactcaacttcaaactcttcaacntccaagtcaaggaggnnacgacgaangatgncgtcacaaccatcgctaataaccttaccagcacggttcaagtcttctcggactcggagtaccagcttccgtacgtcctcggctctgcgcaccagggctgcctccctccgttcccggcggacgtgttcatgattccgcaatacggctacctgacgctcaacaatggcagccaggcagtgggacggtcatccttttactgcctggaatatttcccatcgcagatgctgagaacgggcaataactttacctncagctacacttttgaggacgttcctttccacagcagctacgctcacagccagagcctggaccggctgatgaatcctctcatcgaccagtacctgtattacctgaacagaactcagaatcagtccggaagtgcccaaaacaaggacttgctgtttagccgtgggtctccaactggcatgtctgttcagcccaaaaactggctacctggaccctgttatcggcagcagcgcgtttctaaaacaaaaacagacaacaacaacagcaactttacctggactggtgcttcaaaatataaccttaatgggcgtgaatctataatcaaccctggcactgctatggcctcacacaaagacgacgaagacaagttctttcccatgagcggtgtcatgatttttggaaaggagagcgccggagcttcaaacactgcattggacaatgtcatgatcacagacgaagagannncnaagccactaaccccgtggccactgaaagatttgggactgtggcagtcaatctccaagcagcacannnaccctgcgaccgnagatgtgcatgccatgggagccttacctggaatggtgtggcaagacagagacgtatacctgcagggtcctatttgggccaaaattcctcacacggatggacactttcacccgtctcctctcatgggcggctttggacttaagcacccgcctcctcagatcctcatcaaaaacacgcctgttcctgcgaatcctccggcagagttttcggctacaaagtttgcttcattcatcacccagtattccacaggacaagtgagcgtggagattgaatgggagctgcagaaagaaaacagcaaacgctggaatcccgaagtgcagtatacatctaactatgcaaaatctgccaacgttgatttcactgtggacaacaatggactttatactgagcctcgccccattggcacccgttacctcacccgtccccngtaa

SEQ ID NO: 559 - protein, 723 aa, Artificial Sequence
  Description of Artificial Sequence: Synthetic polypeptide
MAADGYLPDWLEDNLSEGIREWWDLKPGAPKPKVNQQKQDNARGLVLPGYKYLGPFNGLDKGEPVNAADAAALEHDKAYDQQLKAGDNPYLRYNHADAEFQERLQEDTSFGGNLGRAVFQAKKRVLEPFGLVEEGAKTAPGKKRPVEQSPQEPDSSSGIGKTGQQPAKKRLNFGQTGDSESVPDPQPLGEPPATPAAVGPTTMASGGGAPMADNNEGADGVGNASGNWHCDSTWLGDRVITTSTRTWALPTYNNHLYKQISSASTGASNDNHYFGYSTPWGYFDFNRFHCHFSPRDWQRLINNNWGFRPKRLNFKLFNQVKETTDVTTIANNLTSTVQVFSDSEYQLPYVLGSAHQGCLPPFPADVFMIPQYGYLTLNNGSQAVGRSSFYCLEYFPSQMLRTGNNFTSYTFEDVPFHSSYAHSQSLDRLMNPLIDQYLYYLNRTQNQSGSAQNKDLLFSRGSPTGMSVQPKNWLPGPCYRQQRVSKTKTDNNNSNFTWTGASKYNLNGRESIINPGTAMASHKDDEDKFFPMSGVMIFGKESAGASNTALDNVMITDEEATNPVATERFGTVAVNLQSSPATDVHAMGALPGMVWQDRDVYLQGPIWAKIPHTDGHFHPSPLMGGFGLKHPPPQILIKNTPVPANPPAEFSATKFASFITQYSTGQVSVEIEWELQKENSKRWNPEVQYTSNYAKSANVDFTVDNNGLYTEPRPIGTRYLTRP

SEQ ID NO: 560 - DNA, 2208 bp, Artificial Sequence
  Description of Artificial Sequence: Synthetic polynucleotide
atggctgccgatggttatcttccagattggctcgaggacactctctctgaaggaataagacagtggtggaagctcaaacctggcccaccaccaccaaagcccgcagagcggcataaggacgacagcaggggtcttgtgcttcctgggtacaagtacctcggacccttcaacggactcgacaagggagagccggtcaacgaggcagacgccgcggccctcgagcacgacaaagcctatgaccggcagctcgacagcggagacaacccgtacctcaagtacaaccacgccgacgcggagtttcaggagcgccttaaagaagatacgtcttttgggggcaacctcggacgagcagtcttccaggcgaaaaagagggttcttgaacctctgggcctggttgaggaacctgttaagacggctccgggaaaaaagaggccggtagagcactctcctgtggagccagactcctcctcgggaaccggaaaggcgggtcagcagcctgcaagaaaaagattgaattttggtcagactggagacgcagactcagtacctgacccccagcctctcggacagccaccagcagccccctctggtctgggaactaatacgatggctacaggcagtggcgcaccaatggcagacaataacgagggcgccgacggagtgggtaattcctcgggaaattggcattgcgattccacatggatgggcgacagagtcatcaccaccagcacccgaacctgggccctgcccacctacaacaaccacctctacaaacaaatttccagccaatcaggagcctcgaacgacaatcactactttggctacagcaccccttgggggtattttgacttcaacagattccactgccacttttcaccacgtgactggcaaagactcatcaacaacaactggggattccgacccaagagactcaagttcaagctctttaacattcaagtcaaagaggtcacgcagaatgacggtacgacgacgattgccaataaccttaccagcacggttcaggtgtttactgactcggagtaccagctcccgtacgtcctcggctcggcgcatcaaggatgcctcccgccgttcccagcagacgtcttcatggtgccacagtatggatacctcaccctgaacaacgggagtcaggcagtaggacgctcttcattttactgcctggagtactttccttctcagatgctgcgtaccggtaacaactttaccttcagctacacttttgaggacgttcctttccacagcagctacgctcacagccagagtctggaccgtctcatgaatcctctcatcgaccagtacctgtattacttgagcagaacagacgctccaagtggaaccaccacgcagtcaaggcttcagttttctcaggccggagcgagtgacattcgggaccagtctaggaactggcttcctggaccctgttaccgccagcagcgagtatcaaagacatctgcggataacaacaacagtgaatactcgtggactggagctaccaagtaccacctcaatggcagagactctctggtgaatccgggcccggccatggcaagccacaaggacgatgaagaaaagttttttcctcagagcggggttctcatctttgggaagcaaggctcagagaaaacaagtgtggacattgaaaaggtcatgattacagacgaagaggaaatcaggacaaccaatcccgtggctacggagcagtatggttctgtatctaccaacctccagagaggcaacagacaagcagctaccgcagatgtcaacacacaaggcgttcttccaggcatggtctggcaggacagagatgtgtaccttcaggggcccatctgggcaaagattccacacacggacggacattttcacccctctcccctcatgggtggattcggacttaaacaccctcctccacagattctcatcaagaacaccccggtacctgcgaatccttcgaccaccttcagtgcggcaaagtttgcttccttcatcacacagtactccacgggacaggtcagcgtggagatcgagtgggagctgcagaaggaaaacagcaaacgctggaatcccgaagttcagtacacttccaactacaacaagtctgttaatgtggactttactgtggacactaatggcgtgtattcagagcctcgccccattggcaccagatacctgactcgtaatctgtaa

SEQ ID NO: 561 - protein, 735 aa, Artificial Sequence
  Description of Artificial Sequence: Synthetic polypeptide
MAADGYLPDWLEDTLSEGIRQWWKLKPGPPPPKPAERHKDDSRGLVLPGYKYLGPFNGLDKGEPVNEADAAALEHDKAYDRQLDSGDNPYLKYNHADAEFQERLKEDTSFGGNLGRAVFQAKKRVLEPLGLVEEPVKTAPGKKRPVEHSPVEPDSSSGTGKAGQQPARKRLNFGQTGDADSVPDPQPLGQPPAAPSGLGTNTMATGSGAPMADNNEGADGVGNSSGNWHCDSTWMGDRVITTSTRTWALPTYNNHLYKQISSQSGASNDNHYFGYSTPWGYFDFNRFHCHFSPRDWQRLINNNWGFRPKRLKFKLFNIQVKEVTQNDGTTTIANNLTSTVQVFTDSEYQLPYVLGSAHQGCLPPFPADVFMVPQYGYLTLNNGSQAVGRSSFYCLEYFPSQMLRTGNNFTFSYTFEDVPFHSSYAHSQSLDRLMNPLIDQYLYYLSRTDAPSGTTTQSRLQFSQAGASDIRDQSRNWLPGPCYRQQRVSKTSADNNNSEYSWTGATKYHLNGRDSLVNPGPAMASHKDDEEKFFPQSGVLIFGKQGSEKTSVDIEKVMITDEEEIRTTNPVATEQYGSVSTNLQRGNRQAATADVNTQGVLPGMVWQDRDVYLQGPIWAKIPHTDGHFHPSPLMGGFGLKHPPPQILIKNTPVPANPSTTFSAAKFASFITQYSTGQVSVEIEWELQKENSKRWNPEVQYTSNYNKSVNVDFTVDTNGVYSEPRPIGTRYLTRNL

SEQ ID NO: 562 - DNA, 2208 bp, Artificial Sequence
  Description of Artificial Sequence: Synthetic polynucleotide
atggctgccgatggttatcttccagattggctcgaggacactctctctgaaggaataagacagtggtggaagctcaaacctggcccaccaccaccaaagcccgcagagcggcataaggacgacagcaggggtcttgtgcttcctgggtacaagtacctcggacccttcaacggactcgacaagggagagccggtcaacgaggcagacgccgcggccctcgagcacgacaaagcctatgaccggcagctcgacagcggagacaacccgtacctcaagtacaaccacgccgacgcggagtttcaggagcgccttaaagaagatacgtcttttgggggcaacctcggacgagcagtcttccaggcgaaaaagagggttcttgaacctctgggcctggttgaggaacctgttaagacggctccgggaaaaaagaggccggtagagcactctcctgtggagccagactcctcctcgggaaccggaaaggcgggccagcagcctgcaagaaaaagattgaattttggtcagactggagacgcaaactcagtacctgacccccagcctctcggacagccaccagcagccccctctggtctgggaactaatacgatggctacaggcagtggcgcaccaatggcagacaataacgagggcgccgacggagtgggtaattcctcgggaaattggcattgcgattccacatggatgggcgacagagtcatcaccaccagcacccgaacctgggccctgcccacctacaacaaccacctctacaaacaaatttccagccaatcaggagcctcgaacgacaatcactactttggctacagcaccccttgggggtattttgacttcaacagattccactgccacttttcaccacgtgactggcaaagactcatcaacaacaactggggattccgacccaagagactcaagttcaagctctttaacattcaagtcaaagaggtcacgcagaatgacggtacgacgacgattgccaataaccttaccagcacggttcaggtgtttactgactcggagtaccagctcccgtacgtcctcggctcggcgcatcaaggatgcctcccgccgttcccagcagacgtcttcatggtgccacagtatggatacctcaccctgaacaacgggagtcgggcagtaggacgctcttcattttactgcctggagtactttccttctcagatgctgcgtaccggtaacaactttaccttcagctacacttttgaggacgttcctttccacagcagctacgctcacagccagagtctggaccgtctcatgaatcctctcatcgaccagtacctgtattacttgagcagaacagacactccaagtggaaccaccacgcagtcaaggcttcagttttctcaggccggagcgagtgacattcgggaccagtctaggaactggcttcctggaccctgttaccgccagcagcgagtatcaaagacatctgcggataacaacaacagtgaatactcgtggactggagctaccaagtaccacctcaatggcagagactctctggtgaatccgggcccggccatggcaagccacaaggacgatgaagaaaagttttttcctcagagcggggttctcatctttgggaagcaaggctcagagaaaacaagtgtggacattgaaaaggtcatgattacagacgaagaggaaatcaggacgaccaatcccgtggctacggagcagtatggttctgtatctaccaacctccagagaggcaacagacaagcagctaccgcagatgtcaacacacaaggcgttcttccaggcatggtctggcaggacagagatgtgtaccttcaggggcccatctgggcaaagattccacacacggacggacattttcacccctctcccctcatgggtggattcggacttaaacaccctcctccacagattctcatcaagaacaccccggtacctgcgaatccttcgaccaccttcagtgcggcaaagtttgcttccttcatcacacagtactccacgggacaggtcagcgtggagatcgagtgggagctgcagaaggaaaacagcaaacgctggaatcccgaagttcagtacacttccaactacaacaagtctgttaatgtggactttactgtggacactaatggcgtgtatacagagcctcgccccattggcaccagatacctgactcgtaatctgtaa

SEQ ID NO: 563 - protein, 735 aa, Artificial Sequence
  Description of Artificial Sequence: Synthetic polypeptide
MAADGYLPDWLEDTLSEGIRQWWKLKPGPPPPKPAERHKDDSRGLVLPGYKYLGPFNGLDKGEPVNEADAAALEHDKAYDRQLDSGDNPYLKYNHADAEFQERLKEDTSFGGNLGRAVFQAKKRVLEPLGLVEEPVKTAPGKKRPVEHSPVEPDSSSGTGKAGQQPARKRLNFGQTGDANSVPDPQPLGQPPAAPSGLGTNTMATGSGAPMADNNEGADGVGNSSGNWHCDSTWMGDRVITTSTRTWALPTYNNHLYKQISSQSGASNDNHYFGYSTPWGYFDFNRFHCHFSPRDWQRLINNNWGFRPKRLKFKLFNIQVKEVTQNDGTTTIANNLTSTVQVFTDSEYQLPYVLGSAHQGCLPPFPADVFMVPQYGYLTLNNGSRAVGRSSFYCLEYFPSQMLRTGNNFTFSYTFEDVPFHSSYAHSQSLDRLMNPLIDQYLYYLSRTDTPSGTTTQSRLQFSQAGASDIRDQSRNWLPGPCYRQQRVSKTSADNNNSEYSWTGATKYHLNGRDSLVNPGPAMASHKDDEEKFFPQSGVLIFGKQGSEKTSVDIEKVMITDEEEIRTTNPVATEQYGSVSTNLQRGNRQAATADVNTQGVLPGMVWQDRDVYLQGPIWAKIPHTDGHFHPSPLMGGFGLKHPPPQILIKNTPVPANPSTTFSAAKFASFITQYSTGQVSVEIEWELQKENSKRWNPEVQYTSNYNKSVNVDFTVDTNGVYTEPRPIGTRYLTRNL

SEQ ID NO: 564 - DNA, 2211 bp, Artificial Sequence
  Description of Artificial Sequence: Synthetic polynucleotide
atggctgccgatggttatcttccagattggctcgaggacactctctctgaaggaataagacagtggtggaagctcaaacctggcccaccaccaccaaagcccgcagagcggcataaggacgacagcaggggtcttgtgcttcctgggtacaagtacctcggacccttcaacggactcgacaagggagagccggtcaacgaggcagacgccgcggccctcgagcacgacaaggcctacgaccagcagctcaaagcgggtgacaatccgtacctgcggtataaccacgccgacgccgagtttcaggagcgtctgcaagaagatacgtcttttgggggcaacctcgggcgagcagtcttccaggccaagaagcgggttctcgaacctctcggtctggttgaggaaggcgctaagacggctcctggaaagaaacgtccggtagagcagtcgccacaagagccagactcctcctcgggcatcggcaagacaggccagcagcccgctaaaaagagactcaattttggtcagactggcgactcagagtcagtccccgacccacaacctctcggagaacctccagcaacccccgctgctgtgggacctactacaatggcttcaggcggtggcgcaccaatggcagacaataacgaaggcgccgacggagtgggtaatgcctcaggaaattggcattgcgattccacatggctgggcgacagagtcatcaccaccagcacccgaacatgggccttgcccacctataacaaccacctctacaagcaaatctccagtgcttcgacgggggccagcaacgacaaccactacttcggctacagcaccccctgggggtattttgactttaacagattccactgccacttttcaccacgtgactggcagcgactcatcaacaataactggggattccggcccaagagactcagcttcaagctcttcaacatccaggtcaaggaggtcacgacgaatgatggcgtcacaaccatcgctaataaccttaccagcacggttcaagtcttctcggactcggagtaccagcttccgtacgtcctcggctctgcgcaccagggctgcctccctccgttcccggcggacgtgttcatgattccgcaatacggctacctgacgctcaacaatggcagccaagccgtgggacgttcatccttttactgcctggaatatttcccttctcagatgctgagaacgggcaacaactttaccttcagctacacctttgaggaagtgcctttccacagcagctacgcgcacagccagagcctggaccggctgatgaatcctctcatcgatcaatacctgtattacctgaacagaactcaaaatcagtccggaagtgcccaaaacaaggacttgctgtttagccgtgggtctccagctggcatgtctgttcagcccaaaaactggctacctggaccctgttatcggcagcagcgcgtttctaaaacaaaaacagacaacaacaacagcaattttacctggactggtgcttcaaaatataacctcaatgggcgtgaatccatcatcaaccctggcactgctatggcctcacacaaagacgacgaagacaagttctttcccatgagcggtgtcatgatttttggaaaagagagcgccggagcttcaaacactgcattggacaatgtcatgattacggacgaagaggaaattaaagccactaaccctgtggccaccgaaagatttgggaccgtggcagtcaatttccagagcagcagcacagaccctgcgaccggagatgtgcatgctatgggagcattacctggcatggtgtggcaagatagagacgtgtacctgcagggtcccatttgggccaaaattcctcacacagatggacactttcacccgtctcctcttatgggcggctttggactcaagaacccgcctcctcagatcctcatcaaaaacacgcctgttcctgcgaatcctccggcggagttttcagctacaaagtttgcttcattcatcactcaatactccacaggacaagtgagcgtggaaattgaatgggagctgcagaaagaaaacagcaaacgctggaatcccgaagtgcagtatacatctaactatgcaaaatctgccaacgttgatttcactgtggacaacaatggactttatactgagcctcgccccattggcacccgttacctcacccgtcccctgtaa

SEQ ID NO: 565 - protein, 736 aa, Artificial Sequence
  Description of Artificial Sequence: Synthetic polypeptide
MAADGYLPDWLEDTLSEGIRQWWKLKPGPPPPKPAERHKDDSRGLVLPGYKYLGPFNGLDKGEPVNEADAAALEHDKAYDQQLKAGDNPYLRYNHADAEFQERLQEDTSFGGNLGRAVFQAKKRVLEPLGLVEEGAKTAPGKKRPVEQSPQEPDSSSGIGKTGQQPAKKRLNFGQTGDSESVPDPQPLGEPPATPAAVGPTTMASGGGAPMADNNEGADGVGNASGNWHCDSTWLGDRVITTSTRTWALPTYNNHLYKQISSASTGASNDNHYFGYSTPWGYFDFNRFHCHFSPRDWQRLINNNWGFRPKRLSFKLFNIQVKEVTTNDGVTTIANNLTSTVQVFSDSEYQLPYVLGSAHQGCLPPFPADVFMIPQYGYLTLNNGSQAVGRSSFYCLEYFPSQMLRTGNNFTFSYTFEEVPFHSSYAHSQSLDRLMNPLIDQYLYYLNRTQNQSGSAQNKDLLFSRGSPAGMSVQPKNWLPGPCYRQQRVSKTKTDNNNSNFTWTGASKYNLNGRESIINPGTAMASHKDDEDKFFPMSGVMIFGKESAGASNTALDNVMITDEEEIKATNPVATERFGTVAVNFQSSSTDPATGDVHAMGALPGMVWQDRDVYLQGPIWAKIPHTDGHFHPSPLMGGFGLKNPPPQILIKNTPVPANPPAEFSATKFASFITQYSTGQVSVEIEWELQKENSKRWNPEVQYTSNYAKSANVDFTVDNNGLYTEPRPIGTRYLTRPL

SEQ ID NO: 566 - protein, 735 aa, Artificial Sequence
  Description of Artificial Sequence: Synthetic polypeptide
MAADGYLPDWLEDTLSEGIRQWWKLKPGPPPPKPAERHKDDSRGLVLPGYKYLGPFNGLDKGEPVNEADAAALEHDKAYDRQLDSGDNPYLKYNHADAEFQERLKEDTSFGGNLGRAVFQAKKRVLEPLGLVEEPVKTAPGKKRPVEHSPVEPDSSSGTGKAGQQPARKRLNFGQTGDADSVPDPQPLGQPPAAPSGLGTNTMATGSGAPMADNNEGADGVGNSSGNWHCDSTWMGDRVITTSTRTWALPTYNNHLYKQISSQSGASNDNHYFGYSTPWGYFDFNRFHCHFSPRDWQRLINNNWGFRPKRLKFKLFNIQVKEVTQNDGTTTIANNLTSTVQVFTDSEYQLPYVLGSAHQGCLPPFPADVFMVPQYGYLTLNNGSQAVGRSSFYCLEYFPSQMLRTGNNFTFSYTFEDVPFHSSYAHSQSLDRLMNPLIDQYLYYLSRTDTPSGTTTQSRLQFSQAGASDIRNQSRNWLPGPCYRQQRVSKTSADNNNSEYSWTGATKYHLNGRDSLVNPGPAMASHKDDEEKFFPQSGVLIFGKQGSEKTSVDIEKVMITDEEEIRTTNPVATEQYGSVSTNLQRGNRQAATADVNTQGVLPGMVWQDRDVYLQGPIWAKIPHTDGHFHPSPLMGGFGLKHPPPQILIKNTPVPANPSTTFSAAKFASFITQYSTGQVSVEIEWELQKENSKRWNPEVQYTSNYNKSVNVDFTVDTNGVYSEPRPIGTRYLTRNQ

SEQ ID NO: 567 - DNA, 2208 bp, Artificial Sequence
  Description of Artificial Sequence: Synthetic polynucleotide
atggctgccgatggttatcttccagattggctcgaggacactctctctgaaggaataagacagtggtggaagctcaaacctggcccaccaccaccaaagcccgcagagcggcataaggacgacagcaggggtcttgtgcttcctgggtacaagtacctcggacccttcaacggactcgacaagggagagccggtcaacgaggcagacgccgcggccctcgagcacgacaaagcctatgaccggcagctcgacagcggagacaacccgtacctcaagtacaaccacgccgacgcggagtttcaggaacgccttaaagaagatacgtcttttgggggcaacctcggacgagcagtcttccaggcgaaaaagagggttcttgaacctctgggcctggttgaggaacctgttaagacggctccgggaaaaaagaggccggtagagcactctcctgtggagccagactcctcctcgggaaccggaaaggcgggccagcagcctgcaagaaaaagattgaattttggtcagactggagacgcagactcagtacctgacccccagcctctcggacagccaccagcagccccctctggtctgggaactaatacgatggctacaggcagtggcgcaccaatggcagacaataacgagggcgccgacggagtgggtaattcctcgggaaattggcattgcgattccacatggatgggcgacagagtcatcaccaccagcacccgaacctgggccctgcccacctacaacaaccacctctacaaacaaatttccagccaatcaggagcctcgaacgacaatcactactttggctacagcaccccttgggggtattttgacttcaacagattccactgccacttttcaccacgtgactggcaaagactcatcaacaacaactggggattccgacccaagagactcaagttcaagctctttaacattcaagtcaaagaggtcacgcagaatgacggtacgacgacgattgccaataaccttaccagcacggttcaggtgtttactgactcggagtaccagctcccgtacgtcctcggctcggcgcatcaaggatgcctcccgccgttcccagcagacgtcttcatggtgccacagtatggatacctcaccctgaacaacgggagtcaggcagtaggacgctcttcattttactgcctggagtactttccttctcagatgctgcgtaccggtaacaactttaccttcagctacacttttgaggacgttcctttccacagcagctacgctcacagccagagtctggaccgtctcatgaatcctctcatcgaccagtacctgtattacttgagcagaacagacactccaagtggaaccaccacgcagtcaaggcttcagttttctcaggccggagcgagtgacattcggaaccagtctaggaactggcttcctggaccctgttaccgccagcagcgagtatcaaagacatctgcggataacaacaacagtgaatactcgtggactggagctaccaagtaccacctcaatggcagagactctctggtgaatccgggcccggccatggcaagccacaaggacgatgaagaaaagttttttcctcagagcggggttctcatctttgggaagcaaggctcagagaaaacaagtgtggacattgaaaaggtcatgattacagacgaagaggaaatcaggacaaccaatcccgtggctacggagcagtatggttctgtatctaccaacctccagagaggcaacagacaagcagctaccgcagatgtcaacacacaaggcgttcttccaggcatggtctggcaggacagagatgtgtaccttcaggggcccatctgggcaaagattccacacacggacggacattttcacccctctcccctcatgggtggattcggacttaaacaccctcctccacagattctcatcaagaacaccccggtacctgcgaatccttcgaccaccttcagtgcggcaaagtttgcttccttcatcacacagtactccacgggacaggtcagcgtggagatcgagtgggagctgcagaaggaaaacagcaaacgctggaatcccgaagttcagtacacttccaactacaacaagtctgttaatgtggactttactgtggacactaatggcgtgtattcagagcctcgccccattggcaccagatacctgactcgtaatcagtaa

SEQ ID NO: 568 - DNA, 2208 bp, Artificial Sequence
  Description of Artificial Sequence: Synthetic polynucleotide
atggctgccgatggttatcttccagattggctcgaggacactctctctgaaggaataagacagtggtggaagctcaaacctggcccaccaccaccaaagcccgcagagcggcataaggacgacagcaggggtcttgtgcttcctgggtacaagtacctcggacccttcaacggactcgacaagggagagccggtcaacgaggcagacgccgcggccctcgagcacgacaaagcctatgaccggcagctcgacagcggagacaacccgtacctcaagtacaaccacgccgacgcggagtttcaggagcgccttaaagaagatacgtcttttgggggcaacctcggacgagcagtcttccaggcgaaaaagagggttcttgaacctctgggcctggttgaggaacctgttaagacggctccgggaaaaaagaggccggtagagcactctcctgtggagccagactcctcctcgggaaccggaaaggcgggccagcagcctgcaagaaaaagattgaattttggtcagactggagacgcagactcagtacctgatccccagcctctcggacagccaccagcagccccctctggtctgggaactaatacgatggctacaggcagtggcgcaccaatggcagacaataacgagggcgccgacggagtgggtaattcctcgggaaattggcattgcgattccacatggatgggcgacagagtcatcaccaccagcacccgaacctgggccctgcccacctacaacaaccacctctacaaacaaatttccagccaatcaggagcctcgaacgacaatcactactttggctacagcaccccttgggggtattttgacttcaacagattccactgccacttttcaccacgtgactggcaaagactcatcaacaacaactggggattccgacccaagagactcaagttcaagctctttaacattcaagtcaaagaggtcacgcagaatgacggtacgacgacgattgccaataaccttaccagcacggttcaggtgtttactgactcggagtaccagctcccgtatgtcctcggctcggcgcatcaaggatgcctcccgccgttcccagcagacgtcttcatggtgccacagtatggatacctcaccctgaacaacgggagtcaggcagtaggacgctcttcattttactgcctggagtactttccttctcagatgctgcgtaccggtaacaactttaccttcagctacacttttgaggacgttcctttccacagcagctacgctcacagccagagtctggaccgtctcatgaatcctctcatcgaccagtacctgtattacttgagcagaacagacactccaagtggaaccaccacgcagtcaaggcttcagttttctcaggccggagcgagtgacattcgggaccagtctaggaactggcttcctggaccctgttaccgccagcagcgagtatcaaagacatctgcggataacaacaacagtgaatactcgtggactggagctaccaagtaccacctcaatggcagagactctctggtgaatccgggcccggccatggcaagccacaaggacgatgaagaaaagttttttcctcagagcggggttctcatctttgggaagcaaggctcagagaaaacaagtgtggacattgaaaaggtcatgattacagacgaagaggaaatcaggacaaccaatcccgtggctacggagcagtatggttctgtatctaccaacctccagagaggcaacagacaagcagctaccgcagatgtcaacacacaaggcgttcttccaggcatggtctggcaggacagagatgtgtaccttcaggggcccatctgggcaaagattccacacacggacggacattttcacccctctcccctcatgggtggattcggacttaaacaccctcctccacagattctcatcaagaacaccccggtacctgcgaatccttcgaccaccttcagtgcggcaaagtttgcttccttcatcacacagtactccacgggacaggtcagcgtggagatcgagtgggagctgcagaaggaaaacagcaaacgctggaatcccgaagttcagtacacttccaactacaacaagtctgttaatgtggactttactgtggacactaatggcgtgtattcagagcctcgccccattggcaccagatacctgactcgtaatctgtaa

SEQ ID NO: 569 - protein, 735 aa, Artificial Sequence
  Description of Artificial Sequence: Synthetic polypeptide
MAADGYLPDWLEDTLSEGIRQWWKLKPGPPPPKPAERHKDDSRGLVLPGYKYLGPFNGLDKGEPVNEADAAALEHDKAYDRQLDSGDNPYLKYNHADAEFQERLKEDTSFGGNLGRAVFQAKKRVLEPLGLVEEPVKTAPGKKRPVEHSPVEPDSSSGTGKAGQQPARKRLNFGQTGDADSVPDPQPLGQPPAAPSGLGTNTMATGSGAPMADNNEGADGVGNSSGNWHCDSTWMGDRVITTSTRTWALPTYNNHLYKQISSQSGASNDNHYFGYSTPWGYFDFNRFHCHFSPRDWQRLINNNWGFRPKRLKFKLFNIQVKEVTQNDGTTTIANNLTSTVQVFTDSEYQLPYVLGSAHQGCLPPFPADVFMVPQYGYLTLNNGSQAVGRSSFYCLEYFPSQMLRTGNNFTFSYTFEDVPFHSSYAHSQSLDRLMNPLIDQYLYYLSRTDTPSGTTTQSRLQFSQAGASDIRDQSRNWLPGPCYRQQRVSKTSADNNNSEYSWTGATKYHLNGRDSLVNPGPAMASHKDDEEKFFPQSGVLIFGKQGSEKTSVDIEKVMITDEEEIRTTNPVATEQYGSVSTNLQRGNRQAATADVNTQGVLPGMVWQDRDVYLQGPIWAKIPHTDGHFHPSPLMGGFGLKHPPPQILIKNTPVPANPSTTFSAAKFASFITQYSTGQVSVEIEWELQKENSKRWNPEVQYTSNYNKSVNVDFTVDTNGVYSEPRPIGTRYLTRNL

SEQ ID NO: 570 - DNA, 18 bp, Unknown
  Description of unknown: Recognition Site
tagggataacagggtaat

SEQ ID NO: 571 - protein, 1388 aa, Streptococcus thermophilus (strain ATCC BAA-491 / LMD-9)
MTKPYSIGLDIGTNSVGWAVTTDNYKVPSKKMKVLGNTSKKYIKKNLLGVLLFDSGITAEGRRLKRTARRRYTRRRNRILYLQEIFSTEMATLDDAFFQRLDDSFLVPDDKRDSKYPIFGNLVEEKAYHDEFPTIYHLRKYLADSTKKADLRLVYLALAHMIKYRGHFLIEGEFNSKNNDIQKNFQDFLDTYNAIFESDLSLENSKQLEEIVKDKISKLEKKDRILKLFPGEKNSGIFSEFLKLIVGNQADFRKCFNLDEKASLHFSKESYDEDLETLLGYIGDDYSDVFLKAKKLYDAILLSGFLTVTDNETEAPLSSAMIKRYNEHKEDLALLKEYIRNISLKTYNEVFKDDTKNGYAGYIDGKTNQEDFYVYLKKLLAEFEGADYFLEKIDREDFLRKQRTFDNGSIPYQIHLQEMRAILDKQAKFYPFLAKNKERIEKILTFRIPYYVGPLARGNSDFAWSIRKRNEKITPWNFEDVIDKESSAEAFINRMTSFDLYLPEEKVLPKHSLLYETFNVYNELTKVRFIAESMRDYQFLDSKQKKDIVRLYFKDKRKVTDKDIIEYLHAIYGYDGIELKGIEKQFNSSLSTYHDLLNIINDKEFLDDSSNEAIIEEIIHTLTIFEDREMIKQRLSKFENIFDKSVLKKLSRRHYTGWGKLSAKLINGIRDEKSGNTILDYLIDDGISNRNFMQLIHDDALSFKKKIQKAQIIGDEDKGNIKEVVKSLPGSPAIKKGILQSIKIVDELVKVMGGRKPESIVVEMARENQYTNQGKSNSQQRLKRLEKSLKELGSKILKENIPAKLSKIDNNALQNDRLYLYYLQNGKDMYTGDDLDIDRLSNYDIDHIIPQAFLKDNSIDNKVLVSSASNRGKSDDVPSLEVVKKRKTFWYQLLKSKLISQRKFDNLTKAERGGLSPEDKAGFIQRQLVETRQITKHVARLLDEKFNNKKDENNRAVRTVKIITLKSTLVSQFRKDFELYKVREINDFHHAHDAYLNAVVASALLKKYPKLEPEFVYGDYPKYNSFRERKSATEKVYFYSNIMNIFKKSISLADGRVIERPLIEVNEETGESVWNKESDLATVRRVLSYPQVNVVKKVEEQNHGLDRGKPKGLFNANLSSKPKPNSNENLVGAKEYLDPKKYGGYAGISNSFTVLVKGTIEKGAKKKITNVLEFQGISILDRINYRKDKLNFLLEKGYKDIELIIELPKYSLFELSDGSRRMLASILSTNNKRGEIHKGNQIFLSQKFVKLLYHAKRISNTINENHRKYVENHKKEFEELFYYILEFNENYVGAKKNGKLLNSAFQSWQNHSIDELCSSFIGPTGSERKGLFELTSRGSAADFEFLGVKIPRYRDYTPSSLLKDATLIHQSVTGLYETRIDLAKLGEG

SEQ ID NO: 572 - protein, 1368 aa, Streptococcus pyogenes serotype M1 [sequence omitted]

SEQ ID NO: 573 - protein, 1409 aa, Streptococcus thermophilus
MLFNKCIIISINLDFSNKEKCMTKPYSIGLDIGTNSVGWAVITDNYKVPSKKMKVLGNTSKKYIKKNLLGVLLFDSGITAEGRRLKRTARRRYTRRRNRILYLQEIFSTEMATLDDAFFQRLDDSFLVPDDKRDSKYPIFGNLVEEKVYHDEFPTIYHLRKYLADSTKKADLRLVYLALAHMIKYRGHFLIEGEFNSKNNDIQKNFQDFLDTYNAIFESDLSLENSKQLEEIVKDKISKLEKKDRILKLFPGEKNSGIFSEFLKLIVGNQADFRKCFNLDEKASLHFSKESYDEDLETLLGYIGDDYSDVFLKAKKLYDAILLSGFLTVTDNETEAPLSSAMIKRYNEHKEDLALLKEYIRNISLKTYNEVFKDDTKNGYAGYIDGKTNQEDFYVYLKNLLAEFEGADYFLEKIDREDFLRKQRTFDNGSIPYQIHLQEMRAILDKQAKFYPFLAKNKERIEKILTFRIPYYVGPLARGNSDFAWSIRKRNEKITPWNFEDVIDKESSAEAFINRMTSFDLYLPEEKVLPKHSLLYETFNVYNELTKVRFIAESMRDYQFLDSKQKKDIVRLYFKDKRKVTDKDIIEYLHAIYGYDGIELKGIEKQFNSSLSTYHDLLNIINDKEFLDDSSNEAIIEEIIHTLTIFEDREMIKQRLSKFENIFDKSVLKKLSRRHYTGWGKLSAKLINGIRDEKSGNTILDYLIDDGISNRNFMQLIHDDALSFKKKIQKAQIIGDEDKGNIKEVVKSLPGSPAIKKGILQSIKIVDELVKVMGGRKPESIVVEMARENQYTNQGKSNSQQRLKRLEKSLKELGSKILKENIPAKLSKIDNNALQNDRLYLYYLQNGKDMYTGDDLDIDRLSNYDIDHIIPQAFLKDNSIDNKVLVSSASNRGKSDDFPSLEVVKKRKTFWYQLLKSKLISQRKFDNLTKAERGGLLPEDKAGFIQRQLVETRQITKHVARLLDEKFNNKKDENNRAVRTVKIITLKSTLVSQFRKDFELYKVREINDFHHAHDAYLNAVIASALLKKYPKLEPEFVYGDYPKYNSFRERKSATEKVYFYSNIMNIFKKSISLADGRVIERPLIEVNEETGESVWNKESDLATVRRVLSYPQVNVVKKVEEQNHGLDRGKPKGLFNANLSSKPKPNSNENLVGAKEYLDPKKYGGYAGISNSFAVLVKGTIEKGAKKKITNVLEFQGISILDRINYRKDKLNFLLEKGYKDIELIIELPKYSLFELSDGSRRMLASILSTNNKRGEIHKGNQIFLSQKFVKLLYHAKRISNTINENHRKYVENHKKEFEELFYYILEFNENYVGAKKNGKLLNSAFQSWQNHSIDELCSSFIGPTGSERKGLFELTSRGSAADFEFLGVKIPRYRDYTPSSLLKDATLIHQSVTGLYETRIDLAKLGEG

SEQ ID NO: 574 - protein, 1370 aa, Streptococcus ratti FA-1 = DSM 20564
MKKPYSIGLDIGTNSVGWAVITDDYKVPAKKMKVLGNTDKNYIKKNLLGALLFDSGNTAEDRRLKRTARRRYTRRRNRLLYLQDIFSDEMNKVDESFFHRLEDSFLVSEDKRGDHHPIFGNVVDEVKYHEQFPTIYHLRKYLADTPEKADLRLVYLALAHMIKFRGHFLIDDPKLDVKNTDSQELFSQFLTAYDVTQEDSHLADVKINISDIITEKMNKSRKVEALLFHFPSQKKNSFFGNLVSLVFGLLPNFKTNFNLAEDAKLQLSKDSYDEDLENLLGQIGDEYTDVFVAARKLYDSILLSGILTVNDLSTKAILSASMVRRYEEHNKDLAKLKAFVKANFTHDVFKEVFSDASKNGYAGYIEGKTSQEDFYKYVKNLIGKVDGSADFIEKIDREDFLRKQRTFDNGSIPHQVHLAEMKAILRRQGEYYPFLKEHAEKIQQILTFRIPYYVGPLDRHGHSDFAWASFNSEEKVTPWNFEEIIDKNKSAQAFIERMTNQDLYLPNEKVLPKHSPLYEKYTVYNELTKIKYVTETGTAKFFDANLKQEIFDGLFKKERKVTKRKLLTFLEKNFDEFRIVDIQGLDKETETFNASYGIYQDLLKIIKDKAFMDDSENADILEDIVLTLTLFEDREMIKQRLAKYADLFDKKVIDNLARRRYTGWGRLSAKLLNGIRDKRSRKTIMDYLVDDGRSNRNLMQLITDDNLTFKDEIAKAQYSDNSDDLHQVVQDLAGSPAIKKGILQSVKIVDELVKVMGYEPEQIVVEMARENQTTAKGRRNSQQRYKRLEEAIKNLDRDLNYKILKEHPTDNQALQNDRLFLYYLQNGRDMYTGESLDINRLSDYDIDHIIPQAFIKDNSIDNRVLVSSAKNRGKSDDVPSEDVVNRMRPFWNKLLNCGLISQRKYSNLTKKELTPNDKAGFIKRQLVETRQITKHVARILDEHFNKEFDEDKKRIRKVKVVTLKSNLVSNFRKEFELYKVREINDYHHAHDAYLNAVVAKALLMKYPKLEPEFVYGEYPKYNSYRERKTATQRMFFYSNIMNMFKSKVKLADERIIERPMIEVNDETGEIAWDKTKHIATVKKVLSYPQINIVKKVEEQTGGLTNETIYPRGSFDKLLNRKNTLEASKYGGFGSPTVAYCVLVVADSKNENGKVKKLKLGSELLGITILEKNDFENNSLDFLSRKGYQGVQEKKIIKLPKYSLFEFQDGSRRMLSSVMANDNKRGDLQKANEMILPAYLVKLLYHAKHINSVGEPAHKNYINEHCSEFQDLLNYIRQFADKFVDVDKNLSKIRSLSKSMAEYSVSEICSSFVNLLTLTALGAPADFKFFGTTIPRKRYGSPQSILSATLIHQSITGLYETRIDLSKLGED

SEQ ID NO: 575 - protein, 1370 aa, Streptococcus agalactiae ZQ0910
MNKPYSIGLDIGTNSVGWSIITDDYKVPAKKMRVLGNTDKEYIKKNLIGALLFDGGNTAADRRLKRTARRRYTRRRNRILYLQEIFAEEMSKVDDSFFHRLEDSFLVEEDKRGSKYPIFATLQEEKDYHEKFSTIYHLRKELADKKEKADLRLIYIALAHIIKFRGHFLIEDDSFDVRNTDISKQYQDFLEIFNTTFENNDLLSQNVDVEAILTDKISKSAKKDRILAQYPNQKSTGIFAEFLKLIVGNQADFKKYFNLEDKTPLQFAKDSYDEDLENLLGQIGDEFADLFSAAKKLYDSVLLSGILTVIDLSTKAPLSASMIQRYDEHREDLKQLKQFVKASLPEKYQEIFADSSKDGYAGYIEGKTNQEAFYKYLSKLLTKQEDSENFLEKIKNEDFLRKQRTFDNGSIPHQVHLTELKAIIRRQSEYYPFLKENQDRIEKILTFRIPYYIGPLAREKSDFAWMTRKTDDSIRPWNFEDLVDKEKSAEAFIHRMTNNDFYLPEEKVLPKHSLIYEKFTVYNELTKVRYKNEQGETYFFDSNIKQEIFDGVFKEHRKVSKKKLLDFLAKEYEEFRIVDVIGLDKENKAFNASLGTYHDLEKILDKDFLDNPDNESILEDIVQTLTLFEDREMIKKRLENYKDLFTESQLKKLYRRHYTGWGRLSAKLINGIRDKESQKTILDYLIDDGRSNRNFMQLINDDGLSFKSIISKAQAGSHSDNLKEVVGELAGSPAIKKGILQSLKIVDELVKVMGYEPEQIVVEMARENQTTNQGRRNSRQRYKLLDDGVKNLASDLNGNILKEYPTDNQALQNERLFLYYLQNGRDMYTGEALDIDNLSQYDIDHIIPQAFIKDDSIDNRVLVSSAKNRGKSDDVPSLEIVKDCKVFWKKLLDAKLMSQRKYDNLTKAERGGLTSDDKARFIQRQLVETRQITKHVARILDERFNNELDSKGRRIRKVKIVTLKSNLVSNFRKEFGFYKIREVNNYHHAHDAYLNAVVAKAILTKYPQLEPEFVYGDYPKYNSYKTRKSATEKLFFYSNIMNFFKTKVTLADGTVVVKDDIEVNNDTGEIVWDKKKHFATVRKVLSYPQNNIVKKTEIQTGGFSKESILAHGNSDKLIPRKTKDIYLDPKKYGGFDSPIVAYSVLVVADIKKGKAQKLKTVTELLGITIMERSRFEKNPSAFLESKGYLNIRADKLIILPKYSLFELENGRRRLLASAGELQKGNELALPTQFMKFLYLASRYNESKGKPEEIEKKQEFVNQHVSYFDDILQLINDFSKRVILADANLEKINKLYQDNKENISVDELANNIINLFTFTSLGAPAAFKFFDKIVDRKRYTSTKEVLNSTLIHQSITGLYETRIDLGKLGED

SEQ ID NO: 576 - protein, 1371 aa, Streptococcus dysgalactiae subsp. equisimilis AC-2713
MDKKYSIGLDIGTNSVGWAVITDDYKVPSKKFKVLGNTDRHSIKKNLIGALLFDSGETAEATRLKRTARRRYTRRKNRIRYLQEIFSSEMSKVDDSFFHRLEESFLVEEDKKHERHPIFGNIVDEVAYHEKYPTIYHLRKKLADSTDKADLRLIYLALAHMIKFRGHFLIEGDLNPDNSDMDKLFIQLVQTYNQLFEENPINASRVDAKAILSARLSKSRRLENLIAQLPGEKRNGLFGNLIALSLGLTPNFKSNFDLAEDAKLQLSKDTYDDDLDNLLAQIGDQYADLFLAAKNLSDAILLSDILRVNSEITKAPLSASMIKRYDEHHQDLTLLKALVRQQLPEKYKEIFFDQSKNGYAGYIDGGASQEEFYKFIKPILEKMDGTEELLAKLNREDLLRKQRTFDNGSIPHQIHLGELHAILRRQEDFYPFLKDNREKIEKILTFRIPYYVGPLARGNSRFAWMTRKSEETITPWNFEEVVDKGASAQSFIERMTNFDKNLPNEKVLPKHSLLYEYFTVYNELTKVKYVTEGMRKPEFLSGKQKEAIVDLLFKTNRKVTVKQLKEDYFKKIECFDSVEISGVEDRFNASLGTYHDLLKIIKDKDFLDNEENEDILEDIVLTLTLFEDKEMIEERLKKYANLFDDKVMKQLKRRHYTGWGRLSRKLINGIRDKQSGKTILDFLKSDGFANRNFMQLINDDSLTFKEAIQKAQVSGQGHSLHEQIANLAGSPAIKKGILQSVKVVDELVKVMGHKPENIVIEMARENQTTQKGQKNSRERMKRIEEGIKELGSQILKEHPVENTQLQNEKLYLYYLQNGRDMYVDQELDINRLSDYDVDHIVPQSFIKDDSIDNKVLTRSDKNRGKSDNVPSEEVVKKMKNYWRQLLNAKLITQRKFDNLTKAERGGLSELDKAGFIKRQLVETRQITKHVAQILDSRMNTKYDENDKLIREVKVITLKSKLVSDFRKDFQFYKVREINNYHHAHDAYLNAVVGTALIKKYPKLESEFVYGDYKVYDVRKMIAKSEQEIGKATAKRFFYSNIMNFFKTEITLANGEIRKRPLIETNEETGEIVWDKGRDFATVRKVLSMPQVNIVKKTEVQTGALTNESIYARGSFDKLISRKHRFESSKYGGFGSPTVTYSVLVVAKSKVQDGKVKKIKTGKELIGITLLDKLVFEKNPLKFIEDKGYGNVQIDKCIKLPKYSLFEFENGTRRMLASVMANNNSRGDLQKANEMFLPAKLVTLLYHAHKIESSKELEHEAYILDHYNDLYQLLSYIERFASLYVDVEKNISKVKELFSNIESYSISEICSSVINLLTLTASGAPADFKFLGTTIPRKRYGSPQSILSSTLIHQSITGLYETRIDLSQLGGD

SEQ ID NO: 577 - protein, 1370 aa, Streptococcus agalactiae H36B
  MOD_RES (9)..(9): Xaa = any amino acid
MNKPYSIGXDIGTNSVGWSIITDDYKVPAKKMRVLGNTDKEYIKKNLIGALLFDGGNTAADRRLKRTARRRYTRRRNRILYLQEIFAEEMSKVDDSFFHRLEDSFLVEEDKRGSKYPIFATLQEEKDYHEKFSTIYHLRKELADKKEKADLRLIYIALAHIIKFRGHFLIEDDSFDVRNTDISKQYQDFLEIFNTTFENNDLLSQNVDVEAILTDKISKSAKKDRILAQYPNQKSTGIFAEFLKLIVGNQADFKKYFNLEDKTPLQFAKDSYDEDLENLLGQIGDEFADLFSAAKKLYDSVLLSGILTVIDLSTKAPLSASMIQRYDEHREDLKQLKQFVKASLPEKYQEIFADSSKDGYAGYIEGKTNQEAFYKYLSKLLTKQEDSENFLEKIKNEDFLRKQRTFDNGSIPHQVHLTELKAIIRRQSEYYPFLKENQDRIEKILTFRIPYYIGPLAREKSDFAWMTRKTDDSIRPWNFEDLVDKEKSAEAFIHRMTNNDFYLPEEKVLPKHSLIYEKFTVYNELTKVRYKNEQGETYFFDSNIKQEIFDGVFKEHRKVSKKKLLDFLAKEYEEFRIVDVIGLDKENKAFNASLGTYHDLEKILDKDFLDNPDNESILEDIVQTLTLFEDREMIKKRLENYKDLFTESQLKKLYRRHYTGWGRLSAKLINGIRDKESQKTILDYLIDDGRSNRNFMQLINDDGLSFKSIISKAQAGSHSDNLKEVVGELAGSPAIKKGILQSLKIVDELVKVMGYEPEQIVVEMARENQTTNQGRRNSRQRYKLLDDGVKNLASDLNGNILKEYPTDNQALQNERLFLYYLQNGRDMYTGEALDIDNLSQYDIDHIIPQAFIKDDSIDNRVLVSSAKNRGKSDDVPSLEIVKDCKVFWKKLLDAKLMSQRKYDNLTKAERGGLTSDDKARFIQRQLVETRQITKHVARILDERFNNELDSKGRRIRKVKIVTLKSNLVSNFRKEFGFYKIREVNNYHHAHDAYLNAVVAKAILTKYPQLEPEFVYGDYPKYNSYKTRKSATEKLFFYSNIMNFFKTKVTLADGTVVVKDDIEVNNDTGEIVWDKKKHFATVRKVLSYPQNNIVKKTEIQTGGFSKESILAHGNSDKLIPRKTKDIYLDPKKYGGFDSPIVAYSVLVVADIKKGKAQKLKTVTELLGITIMERSRFEKNPSAFLESKGYLNIRADKLIILPKYSLFELENGRRRLLASAGELQKGNELALPTQFMKFLYLASRYNESKGKPEEIEKKQEFVNQHVSYFDDILQLINDFSKRVILADANLEKINKLYQDNKENISVDELANNIINLFTFTSLGAPAAFKFFDKIVDRKRYTSTKEVLNSTLIHQSITGLYETRIDLGKLGED

SEQ ID NO: 578 - protein, 1345 aa, Streptococcus mutans A19
MKKPYSIGLDIGTNSVGWSVVTDDYKVPAKKMKVLGNTDKSHIEKNLLGALLFDSGNTAEDRRLKRTARRRYTRRRNRILYLQEIFSEEMGKVDDSFFHRLEDSFLVTEDKRGERHPIFGNLEEEVKYHENFPTIYHLRQYLADNPEKVDLRLVYLALAHIIKFRGHFLIEGKFDTRNNDVQRLFQEFLAVYDNTFENSSLQEQNVQVEEILTDKISKSAKKDRVLKLFPNEKSNGRFAEFLKLIVGNQADFKKHFELEEKAPLQFSKDTYEEELEVLLAQIGDNYAELFLSAKKLYDSILLSGILTVTDVGTKAPLSASMIQRYNEHQMDLAQLKQFIRQKLSDKYNEVFSDVSKDGYAGYIDGKTNQEAFYKYLKGLLNKIEGSGYFLDKIEREDFLRKQRTFDNGSIPHQIHLQEMRAIIRRQAEFYPFLADNQDRIEKLLTFRIPYYVGPLARGKSDFAWLSRKSADKITPWNFDEIVDKESSAEAFINRMTNYDLYLPNQKVLPKHSLLYEKFTVYNELTKVKYKTEQGKTAFFDANMKQEIFDGVFKVYRKVTKDKLMDFLEKEFDEFRIVDLTGLDKENKVFNASYGTYHDLCKILDKDFLDNSKNEKILEDIVLTLTLFEDREMIRKRLENYSDLLTKEQVKKLERRHYTGWGRLSAELIHGIRNKESRKTILDYLIDDGNSNRNFMQLINDDALSFKEEIAKAQVIGETDNLNQVVSDIAGSPAIKKGILQSLKIVDELVKIMGHQPENIVVEMARENQFTNQGRRNSQQRLKGLTDSIKEFGSQILKEHPVENSQLQNDRLFLYYLQNGRDMYTGEELDIDYLSQYDIDHIIPQAFIKDNSIDNRVLTSSKENRGKSDDVPSKDVVRKMKSYWSKLLSAKLITQRKFDNLTKAERGGLTDDDKAGFIKRQLVETRQITKHVARILDERFNTETDENNKKIRQVKIVTLKSNLVSNFRKEFELYKVREINDYHHAHDAYLNAVIGKALLGVYPQLEPEFVYGDYPHFHGHKENKATAKKFFYSNIMNFFKKDDVRIDKNGEIIWKKDEHISNIKKVLSYPQVNIVKKVEEQTGGFSKESILPKGNSDKLIPRKTKKFYWDTKKYGGFDSPIVAYSILVIADIEKGKSKKLKTVKALVGVTIMEKMTFERDPVAFLERKGYRNVQEENIIKLPKYSLFKLENGRKRLLASARELQKGNEIVLPNHLGTLLYHAKNIHKVDEPKHLDYVDKHKDEFKELLDVVSNFSKKYTLAEGNLEKIKELYAQNNGEDLKELASSFINLLTFTAIGAPATFKFFDKNIDRKRYTSTTEILNATLIHQSITGLYETRIDLSKLGGD

SEQ ID NO: 579 - protein, 1370 aa, Streptococcus agalactiae CJB111
  MOD_RES (117)..(117): Xaa = any amino acid
MNKPYSIGLDIGTNSVGWSIITDDYKVPAKKMRVLGNTDKEYIKKNLIGALLFDGGNTAADRRLKRTARRRYTRRRNRILYLQEIFAEEMSKVDDSFFHRLEDSFLVEEDKRGSKYXIFATLQEEKDYHEKFSTIYHLRKELADKKEKADLRLIYIALAHIIKFRGHFLIEDDSFDVRNTDISKQYQDFLEIFNTTFENNDLLSQNVDVEAILTDKISKSAKKDRILAQYPNQKSTGIFAEFLKLIVGNQADFKKYFNLEDKTPLQFAKDSYDEDLENLLGQIGDEFADLFSAAKKLYDSVLLSGILTVIDLSTKAPLSASMIQRYDEHREDLKQLKQFVKASLPEKYQEIFADSSKDGYAGYIEGKTNQEAFYKYLSKLLTKQEDSENFLEKIKNEDFLRKQRTFDNGSIPHQVHLTELKAIIRRQSEYYPFLKENQDRIEKILTFRIPYYIGPLAREKSDFAWMTRKTDDSIRPWNFEDLVDKEKSAEAFIHRMTNNDFYLPEEKVLPKHSLIYEKFTVYNELTKVRYKNEQGETYFFDSNIKQEIFDGVFKEHRKVSKKKLLDFLAKEYEEFRIVDVIGLDKENKAFNASLGTYHDLEKILDKDFLDNPDNESILEDIVQTLTLFEDREMIKKRLENYKDLFTESQLKKLYRRHYTGWGRLSAKLINGIRDKESQKTILDYLIDDGRSNRNFMQLINDDGLSFKSIISKAQAGSHSDNLKEVVGELAGSPAIKKGILQSLKIVDELVKVMGYEPEQIVVEMARENQTTNQGRRNSRQRYKLLDDGVKNLASDLNGNILKEYPTDNQALQNERLFLYYLQNGRDMYTGEALDIDNLSQYDIDHIIPQAFIKDDSIDNRVLVSSAKNRGKSDDVPSLEIVKDCKVFWKKLLDAKLMSQRKYDNLTKAERGGLTSDDKARFIQRQLVETRQITKHVARILDERFNNELDSKGRRIRKVKIVTLKSNLVSNFRKEFGFYKIREVNNYHHAHDAYLNAVVAKAILTKYPQLEPEFVYGDYPKYNSYKTRKSATEKLFFYSNIMNFFKTKVTLADGTVVVKDDIEVNNDTGEIVWDKKKHFATVRKVLSYPQNNIVKKTEIQTGGFSKESILAHGNSDKLIPRKTKDIYLDPKKYGGFDSPIVAYSVLVVADIKKGKAQKLKTVTELLGITIMERSRFEKNPSAFLESKGYLNIRADKLIILPKYSLFELENGRRRLLASAGELQKGNELALPTQFMKFLYLASRYNESKGKPEEIEKKQEFVNQHVSYFDDILQLINDFSKRVILADANLEKINKLYQDNKENISVDELANNIINLFTFTSLGAPAAFKFFDKIVDRKRYTSTKEVLNSTLIHQSITGLYETRIDLGKLGED

SEQ ID NO: 580 - protein, 1370 aa, Streptococcus agalactiae LADL-90-503
MNKPYSIGLDIGTNSVGWSIITDDYKVPAKKMRVLGNTDKEYIKKNLIGALLFDGGNTAADRRLKRTARRRYTRRRNRILYLQEIFAEEMSKVDDSFFHRLEDSFLVEEDKRGSKYPIFATMQEEKDYHEKFPTIYHLRKELADKKEKADLRLVYLALAHIIKFRGHFLIEDDRFDVRNTDIQKQYQAFLEIFDTSFENNHLLSQNVDVEAILTDKISKSAKKDRILAQYPNQKSTGIFAEFLKLIVGNQADFKKHFNLEDKTPLQFAKDSYDEDLENLLGQIGDEFADLFSAAKKLYDSVLLSGILTVTDLSTKAPLSAYMIQRYDEHREDLKQLKQFVKASLPEKYQEIFADSSKDGYAGYIEGKTNQEAFYKYLSKLLTKQEDSEYFLEKIKNEDFLRKQRTFDNGSIPHQVHLTELKAIIRRQSEYYPFLKENQDKIEKILTFRIPYYVGPLARGNSDFAWMTRKTDDSIRPWNFEDLVDKEKSAEAFIHRMTNNDLYLPEEKVLPKHSLIYEKFTVYNELTKVRYKNEQGETYFFDSNVKQEIFDGVFKEHRKVSKKQLLDFLAKEFEEFRIVDVTGLDKENKAFNASLGTYHDLKKILDKDFLDNPDNESILEDIVQTITLFEDREMIKKRLENYKDLFTESQLKKLYRRHYTGWGRLSAKLINGIRDRESQKTILDYLISDGRANRNFMQLINDDGLSFKSIISKAQSGSHSDNLKEVVGELAGSPAIKKGILQSLKIVDELVKVMGYEPEQIVVEMARENQTTNQGRRNSRQRYKLLEDGVKNLASDLNGDILKEYPTDNQALQNERLFLYYLQNGRDMYTGEALDIDNLSQYDIDHIVPQAFIKDDSIDNRVLVSSAKNRGKSDDVPSIDIVKARKAFWKKLLDAKLISQRKYDNLTKAERGGLTPDDKAGFIQRQLVETRQITKHVARILDERFNNKVDDNNKPIRKVKIVTLKSNLVSNFRKEFGFYKIREVNNYHHAHDAYLNAVVAKAILTKYPQLEPEFVYGDYPKYNSYKTRKSATEKLFFYSNIMNFFKTKVTLADETVVVKDDIEVNNETGEIAWDKKKHFATVRKVLSYPQVNIVKKTEVQTGGFSKESILAHSNSDKLIPRKTKDIYLDPKKYGGFDSPIVAYSVLVLADIKKGKAQKLKTVKELIGITIMERERFEKNPSAFLESKGYLNIRTDKLIILPKYSLFELENGRRRLLASAGELQKGNELALPTQYMKFLYLASRYNESKGKPEEIEKKQEFVNQHISYFDDILQLINDFSKRVILADANLEKINKLYSDNKDNTPVDELAKNIINLFTFTSLGAPAAFKFFDKSVDRKRYTSTKEVLDSTLIHQSITGLYETRIDLGKLGED

SEQ ID NO: 581 - protein, 1345 aa, Streptococcus mutans ATCC 25175
MKKPYSIGLDIGTNSVGWAVVTDDYKVPAKKMKVLGNTDKSHIKKNLLGALLFDSGNTAADRRLKRTARRRYTRRRNRILYLQEIFAEEMSKVDDSFFHRLEDSFLVTEDKRGERHPIFGNLEEEVKYHENFPTIYHLRQYLADNPEKVDLRLVYLALAHIIKFRGHFLIEGKFDTRNNDVQRLFQEFLAVYDNTFENSSLQEQNVQVEEILTDKISKSAKKDRVLKLFPNEKSNGRFAEFLKLIVGNQADFKKHFELEEKAPLQFSKDTYEEELEVLLAQIGDNYAELFLSAKKLYDSILLSGILTVTDVSTKAPLSASMIQRYNEHQMDLAQLKQFIRQKLSDKYNEVFSDVSKDGYAGYIDGKTNQEAFYKYLKGLLNKIEGSGYFLDKIEREDFLRKQRTFDNGSIPHQIHLQEMRAIIRRQAEFYPFLADNQDRIEKILTFRIPYYVGPLARGKSDFAWLSRKSADKITPWNFDEIVDKESSAEAFINRMTNYDLYLPNQKVLPKHSLLYEKFTVYNELTKVKYKTEQGKTAFFDANMKQEIFDGVFKVYRKVTKDKLMDFLEKEFDEFRIVDLTGLDKENKVFNASYGTYHDLCKILDKDFLDNSKNEKILEDIVLTLTLFEDREMIRKRLENYSDLLTKEQVKKLERRHYTGWGRLSAELIHGIRNKESRKTILDYLIDDGNSNRNFMQLINDDALSFKEEIAKAQVIGETDNLNQVVSDIAGSPAIKKGILQSLKIVDELVKIMGHQPENIVVEMARENQFTKQGRRNSQQRLKGLTDSIKEFGSQILKEHPVENSQLQNDRLFLYYLQNGRDMYTGEELDIDYLSQYDIDHIIPQAFIKDNSIDNRVLTSSKENRGKSDDVPSKDVVRKMKSYWSKLLSAKLITQRKFDNLTKAERGGLTDDDKAGFIKRQLVETRQITKHVARILDERFYTETDENNKKIRQVKIVTLKSNLVSNFRKEFELYKVREINDYHHAHDAYLNAVIGKALLGVYPQLEPEFVYGDYPHFHGHKENKATAKKFFYSNIMNFFKKDDVRTDKNGEIIWKKDEHISNIKKVLSYPQVNIVKKVEEQTGGFSKESILPKGNSDKLIPRKTKKFYWDTKKYGGFDSPIVAYSILVIADIEKGKSKKLKTVKALVGVTIMEKMTFERDPVAFLERKGYRNVQEENIIKLPKYSLFKLENGRKRLLASARELQKGNEIVLPNHLGTLLYHAKNIHKVDEPKHLDYVDKHKDEFKELLDVVSNFSKKYTLAEGNLEKIKELYAQNNGEDLKELASSFINLLTFTAIGAPATFKFFDKNIDRKRYTSTTEILNATLIHQSITGLYETRIDLSKLGGD

SEQ ID NO: 582 - protein, 1350 aa, Streptococcus mutans KK23
MKKPYSIGLDIGTNSVGWAVVTDDYKVPAKKMKVLGNTDKSHIEKNLLGALLFDSGNTAEDRRLKRTARRRYTRRRNRILYLQEIFSEEMGKVDDSFFHRLEDSFLVTEDKRGERHPIFGNLEEEVKYHENFPTIYHLRQYLADNPEKVDLRLVYLALAHIIKFRGHFLIEGKFDTRNNDVQRLFQEFLAVYDNTFENSSLQEQNVQVEEILTDKISKSAKKDRVLKLFPNEKSNGRFAEFLKLIVGNQADFKKHFELEEKAPLQFSKDTYEEELEVLLAQIGDNYAELFLSAKKLYDSILLSGILTVTDVSTKAPLSASMIQRYNEHQMDLTQLKQFIRQKLSDKYNEVFSDVSKDGYAGYIDGKTNQEAFYKYLKGLLNKIEGSGYFLDKIEREDFLRKQRTFDNGSIPHQIHLQEMRAIIRRQAEFYPFLADNQDRIEKILTFRIPYYVGPLARGKSDFAWLSRKSADKITPWNFDEIVDKESSAEAFINRMTNYDLYLPNQKVLPKHSLLYEKFTVYNELTKVKYKTEQGKTAFFDANMKQEIFDGVFKVYRKVTKDKLMDFLEKEFDEFRIVDLTGLDKENKAFNASYGTYHDLRKILDKDFLDNSKNEKILEDIVLTLTLFEDREMIRKRLKNYSDLLTKEQLKKLERRHYTGWGRLSAELIHGIRNKESRKTILDYLIDDGNSNRNFMQLINDDALSFKEEIAKAQVIGETDNLNQVVSDIAGSPAIKKGILQSLKIVDELVKIMGHQPENIVVEMARENQFTNQGRQNSQQRLKGLTDSIKEFGSQILKEHPVENSQLQNDRLFLYYLQNGRDMYTGEELDIDYLSQYDIDHIIPQAFIKDNSIDNRVLTSSKENRGKSDDVPSEDVVNRMRPFWNKLLSSGLISQRKYNNLTKKELTLDDKAGFIKRQLVETRQITKHVARMLDERFNKEFDDNNKRICKVKIVTLKSNLVSSFRKEFELYKVREINDYHHAHDAYLNAVVVKALLVKYSKLEPEFVYGEYPKYNSYRERKTATQKMFFYSNIMNMFKSKVKLADDQIVERPMIEVNDETGEIAWDKTKHITTVKKVLSYPQVNIVKKVEEQTIGQNGGLFDDNPKSPLEVIPSKLVPLKKALNPEKYGGYQKPTTAYPILLIVDTKQLIPISVMDKKRFEQNPVKFLKDKGYQQIEKNNFVKLPKYTLVDIGNGIKRLWASSKEVHKGNQLVVSKKSQDLLYHAHHLDNDYSNEYVKNHYQQFDILFNEITSFSKKCKLGKEHIQKIEEAYSKERDSASIEELADGFIKLLGFTQLGATSPFSFLGIKLNQKQYTGKKDYLLPCMEATLIHQSITGLYETRIDLSKLGGD

SEQ ID NO: 583 - protein, 1345 aa, Streptococcus mutans S1B
MKKPYSIGLDIGTNSVGWAVVTDDYKVPAKKMKVLGNTDKSHIKKNLLGALLFDSGNTAEDRRLKRTARRRYTRRRNRILYLQEIFSEEMGKVDDSFFHRLDESFLTDDDKNFDSYPIFGNKAEEDAYHQKFPTIYHLRKHLADSTEKADLRLVYLALAHMIKFRGHFLIEGELNAENTDVQKLFADFVGVYDRTFDDSHLSEITVDASSILTEKISKSRRLEKLINNYPKEKKNTLFRNLVALSLGLQPNFKTNFKLSEDAKLQFSKDTYEEDLEELLGKIGDDYADLFTLAKNLYDAILLSGILTADDSSTKAPLSASMIKRYAEHHEDLEKLKEFIKANKPELYHDIFKDETKNGYAGYIENGVKQDEFYKYLKNTLSKIAGSDYFLDKIEREDFLRKQRTFDNGSIPHQIHLQEMHAILRRQGDYYPFLKENQDRIEKILTFRIPYYVGPLARGKSDFAWLSRKSADKITPWNFDEIVDKESSVEAFINRMTNYDLYLPNQKVLPKHSLLYEKFTVYNELTKVKYKTEQGKTAFFDANMKQEIFDGVFKVYRKVTKDKLMDFLEKEFDEFRIVDLTGLDKENKAFNASYGTYHDLRKILDKDFLDNSKNEKILEDIVLTLTLFEDREMIRKRLKNYSDLLTKEQLKKLERRHYTGWGRLSAELIHGIRNKESRKTILDYLIDDGNSNRNFMQLINDDALSFKEEIAKAQVIGETDNLNQVVSDIAGSPAIKKGILQSLKIVDELVKIMGHQPENIVVEMARENQFTNQGRRNSQQRLKGLTDSIKEFGSQILKEHPVENSQLQNDRLFLYYLQNGRDMYTGEELDIDYLSQYDIDHIIPQAFIKDNSIDNRVLTSSKENRGKSDDVPSKDVVRKMKSYWSKLLSAKLITQRKFDNLTKGERGGLTDDDKAGFIKRQLVETRQITKHVARILDERFNTETDENNKKIRQVKIVTLKSNLVSNFRKEFELYKVREINDYHHAHDAYLNAVIGKALLGVYPQLEPEFVYGDYPHFHGHKENKATAKKFFYSNIMNFFKKDDVRTDKNGEIIWKKDEYISNIKKVLSYPQVNIVKKVEEQTGGFSKESILPKGDSDKLIPRKTKKFYWDTKKYGGFDSPIVAYSILVIADIEKGKSKKLKTVKALVGVTIMEKMTFERDPVAFLERKGYRNVQEENIIKLPKYSLFKLENGRKRLLASARELQKGNEIVLPNHLGTLLYHAKNIHKVDEPKHLDYVDKHKDEFKELLDVVSNFSKKYTLAEGNLEKIKELYAQNNGEDLKELASSFINLLTFTAIGAPATFKFFDKNIDRKRYTSTTEILNATLIHQSITGLYETRIDLSKLGGD

SEQ ID NO: 584 - protein, 1371 aa, Streptococcus oralis SK610
MENKNYSIGLDIGTNSVGWSVITDDYKVPSKKMKVLGNTDKRFIKKNLIGALLFDEGTTAEARRLKRTARRRYTRRKNRLRYLQEIFAEEMSKVDSSFFHRLDDSFLIPEDKRGSKYPIFATLAEEKEYHKQFPTIYHLRKQLADSKEKTDLRLIYLALAHMIKYRGHFLYEDTFDIKNNDIQKIFSEFISIYDNTFEGSSLSGQNAQVEAIFTDKISKSAKRERVLKLFPDEKSTGLFSEFLKLIVGNQADFKKHFDLGEKAPLQFSKDTYDEDLENLLGQIGDDFADLFLVAKKLYDAILLSGILTVTDPSTKAPLSASMIERYENHQKDLAVLKQFIKNNLPEKYDEVFSDQSKDGYAGYIDGKTTQEAFYKYIKNLLSKFEGTDYFLEKIEREDFLRKQRTFDNGSIPHQIHLQEMNAILRRQGEHYPFLKDNKEKIEKILTFRIPYYVGPLARGNRDFAWLTRNSDEAIRPWNFEEIVDKASSAEDFINKMTNYDLYLPEEKVLPKHSLLYETFAVYNELTKVKFIAEGLRDYQFLDSGQKKQIVTQLFKEKRKVTEKDIIQFLHNVDGYDGIELKGIEKQFNASLSTYHDLLKIIKDKEFMDDSKNEEILENIVHTLTIFEDREMIKQRLAQYDSLFDEKVIKALIRRHYTGWGKLSAKLIDGICDKQTGNTILDYLIDDGKNNRNFMQLINDDGLSFKEITQKAQVVGKTDDVKQVVQELPGSPAIKKGILQSIKIVDELVKVMGHTPESIVIEMARENQTTARGKKNSQQRYKRIEDALKNLASGLDSNILKEHPTNNIQLQNDRLFLYYLQNGRDMYTGKPLDINQLSSYDIDHIVPQAFIKDDSLDNRVLTSLKDNRGKSDNVPSIEVVQKRKAFWQQLLDSKLISERKFNNLTKAERGGLDERDKVGFIKRQLVETRQITKHVAQILDARFNKEVNEKDKKNRTVKIITLKSNLVSNFRKEFRLYKVREINDYHHAHDAYLNAVVAKAILKKYPKLEPEFVYGDYQKYDLKRYISRSRNPKEVEKATEKYFFYSNLLNFFKEEVHYADGTIVKRENIEYSKDTGEIAWNKEKDFATIKKVLSYPQVNIVKKREVQTGGFSKESILPKGNSDKLIPRKTKDILWETTKYGGFDSPVIAYSILLIADIEKGKAKKLKTVKTLVGITIMEKAAFEENPITFLENKGYHNVRKENILCLPKYSLFELENGRRRLLASAKELQKGNEIVLPVYLTTLLYHSKNVHKLDEPEHLEYIQKHRNEFKDLLNLVSEFSQKYVLADANLEKIQNLYADNEQADIEILANSFINLLTFTALGAPAAFKFFGKDIDRKRYTTVSEILNATLIHQSITGLYETRIDLSKLGED

SEQ ID NO: 585 - protein, 1377 aa, Streptococcus agalactiae 515
MNKPYSIGLDIGTNSVGWSIITDDYKVPAKKMRVLGNTDKEYIKKNLIGALLFDGGNTAADRRLKRTARRRYTRRRNRILYLQEIFAEEMSKVDDSFFHRLEDSFLVEEDKRGSKYPIFATMQEEKYYHEKFPTIYHLRKELADKKEKADLRLVYLALAHIIKFRGHFLIEDDRFDVRNTDIQKQYQAFLEIFDTTFENNHLLSQNVDVEAILTDKISKSAKKDRILAQYPNQKSTGIFAEFLKLIVGNQADFKKHFNLEDKTPLQFAKDSYDEDLENLLGQIGDEFADLFSVAKKLYDSVLLSGILTVTDLSTKAPLSASMIQRYDEHHEDLKHLKQFVKASLPENYREVFADSSKDGYAGYIEGKTNQEAFYKYLLKLLTKQEGSEYFLEKIKNEDFLRKQRTFDNGSIPHQVHLTELRAIIRRQSEYYPFLKENQDRIEKILTFRIPYYVGPLAREKSDFAWMTRKTDDSIRPWNFEDLVDKEKSAEAFIHRMTNNDLYLPEEKVLPKHSLIYEKFTVYNELTKVRFLAEGFKDFQFLNRKQKETIFNSLFKEKRKVTEKDIISFLNKVDGYEGIAIKGIEKQFNASLSTYHDLKKILGKDFLDNTDNELILEDIVQTLTLFEDREMIKKCLDIYKDFFTESQLKKLYRRHYTGWGRLSAKLINGIRNKENQKTILDYLIDDGSANRNFMQLINDDDLSFKPIIDKARTGSHSDNLKEVVGELAGSPAIKKGILQSLKIVDELVKVMGYEPEQIVVEMARENQTTAKGLSRSRQRLTTLRESLANLKSNILEEKKPKYVKDQVENHHLSDDRLFLYYLQNGRDMYTKKALDIDNLSQYDIDHIIPQAFIKDDSIDNRVLVSSAKNRGKSDDVPSIEIVKARKMFWKNLLDAKLMSQRKYDNLTKAERGGLTSDDKARFIQRQLVETRQITKHVARILDERFNNEVDNGKKICKVKIVTLKSNLVSNFRKEFGFYKIREVNDYHHAHDAYLNAVVAKAILTKYPQLEPEFVYGMYRQKKLSKIVHEDKEEKYSEATRKMFFYSNLMNMFKRVVRLADGSIVVRPVIETGRYMGKTAWDKKKHFATVRKVLSYPQNNIVKKTEIQTGGFSKESILAHGNSDKLIPRKTKDIYLDPKKYGGFDSPIVAYSVLVVADIKKGKAQKLKTVTELLGITIMERSRFEKNPSAFLESKGYLNIRDDKLMILPKYSLFELENGRRRLLASAGELQKGNELALPTQFMKFLYLASRYNESKGKPEEIEKKQEFVNQHVSYFDDILQLINDFSKRVILADANLEKINKLYQDNKENIPVDELANNIINLFTFTSLGAPAAFKFFDKIVDRKRYTSTKEVLNSTLIHQSITGLYETRIDLGKLGED

SEQ ID NO: 586 - protein, 1375 aa, Streptococcus sp. M334
MSNKSYSIGLDIGTNSVGWAVITDDYKVPSKKMKVLGNTDKHFIKKNLIGALLFDEGTTAEDRRLKRTARRRYTRRKNRLRYLQEIFSQEISKVDSSFFHRLDDFFLVPEDKRGSKYPIFATLVEEKEYHKKFPTIYHLRKHLADSKEKTDLRLIYLALAHMIKYRGHFLYEESFDIKNNDIQKIFSEFISIYDNTFEGKSLSGQNAQVEAIFTDKISKSTKRERVLKLFPDEKSTGLFSEFLKLIVGNQADFKKHFDLEEKAPLQFSKDTYDEDLENLLGQIGDDFADLFLVAKKLYDAILLSGILTVKDLSTKAPLSASMIERYENHQKDLAALKQFIQNNLQEKYDEVFSDQSKDGYAGYIDGKTTQEAFYKYIKNLLSKFEGADYFLDKIEREDFLKKQRTFDNGSIPHQIHLQEMNAIIRRQGEHYPFLQENKEKIEKILTFRIPYYVGPLARGNGDFAWLTRNSDQAIRPWNFEEIVDQASSAEDFINKMTNYDLYLPEEKVLPKHSLLYETFAVYNELTKVKFIAEGLTRYQFLDKKQKKDIFDTFFKAENKRKVTEKDIIHYLHNVDGYDGIELKGIEKQFNASLSTYHDLLKIIKDKAFMDDSKNEEILENIIHTLTIFEDREMIKQRLAQYDSLFDEKVIKALTRRHYTGWGKLSAKLINGIRDKKSGKTILDYLIDDGEINRNFMQLIHDDGLSFKEIIQKAQVFGKTNDVKQVVQELPGSPAIKKGILQSIKIVDELVKVMGHAPESIVIEMARENQTTARGKKNSQQRYKRIEDSLKNLASGLDSNILKENPTDNIQLQNDRLFLYYLQNGRDMYTGKPLEINQLSNYDIDHIIPQAFIKDDSLDNRVLTSSKDNRGKSDNVPSLEVVEKMKAFWQQLLDSKLISERKFNNLTKAERERGGLNELDKVGFIKRQLVETRQITKHVAQFLDARFNKEVTEKDKKNRNVKIITLKSNLVSNFRKEFGLYKVREINDYHHAHDAYLNAVLAKAILKKYPKLEPEFVYGDYQKYDLQRYISKSREPKEVEKATQKYFFYSNLLNFFKEEVHYADGTIVKRENIEYSKDTGEIAWNKEKDFATVKKVLSLPQVNIVKKTEVQTGGFSKESILPKGNSDKLIPRKTKEILWDTTKYGGFDSPVIAYSILLIADIEKGKAKKLKTVKTLVGITIMEKATFEKNPITFLENKGYHNVRKENILCLPKYSLFELESGRRRMLASAKELQKGNEIVLPVYLTTLLYHSKNVHKLDEPEHLEYIQKHRYEFKDLLNLVSEFSQKYVLADANLEKIKNLYADNEQADIEILANSFINLLTFTALGAPAAFKFLGKDVDRKRYTTVSEILNATLIHQSITGLYETRIDLSKLGED

SEQ ID NO: 587 - protein, 1396 aa, Streptococcus anginosus SK52 = DSM 20563
MTKPYSIGLDIGTNSVGWAVITDDYKVPAKKMKVLGNTNRDYIKKNLLGALLFDGGETAEGRRLKRTARRRYTRRKNRLRYLQEIFAEEMMQVDESFFQRLDDSFLVEEDKQGSKYPIFGTLKEEKEYHKKFKTIYHLREELANSKEKADLRLVYLALAHMIKFRGHFLYEGDLKAENTDVQALFKDFVEEYDKTIEESHLSEITVDALSILTEKVSKSSRLENLIAHYPTEKKNTLFGNLIALSLGLQANFKTNFQLSEDAKLQFSKDTYEEDLEGLLGEVGDEYADLFVSAKNLYDAILLSGILTVDDNSTKAPLSASMVKRYKEHKEELAAFKRFIKEKLPKKYEEIFKDDTKNGYAGYVGADKKLRKRSGKLATEEEFYKYVKGILNKVEGADYFLDKIDREDFLRKQRTFDNGSIPHQIHLQEMHAILRRQGEHYPFLKENQDKIEKILTFRIPYYVGPLARKGSRFAWAEYKADEKITPWNFDDILDKEKSAEKFITRMTLNDLYLPEEKVLPKHSPLYETFTVYNELTKVKYVNEQGEAKFFDTNMKQEIFDHVFKENRKVTKDKLLNYLNKEFEEFRIVNLTGLDKENKAFNASLGTYHDLRKILDKSFLDDKVNEKIIEDIIQTLTLFEDREMIRQRLQKYSDIFTTQQLKELERRHYTGWGRLSYKLINGIRNKENKKTILDYLIDDGYANRNFMQLINDDALSFKEEIARAQIIGDVDDIANVVHDLPGSPAIKKGILQSVKIVDELVKVMGHNPTNIIIEMARENQTTDKGRRNSQQRLKLLQDSLKNLDNPVNIKNVENQQLQNDRLFLYYIQNGKDMYTGETLDINNLSQYDIDHIIPQAFIKDNSLDNRVLTRSDKNRGKSDDVPSIEVVHEMKSFWSKLLSVKLITQRKFDNLTKAERGGLTENDKAGFIKRQLVETRQITKHVAQVLDARFNAKHDENKKVIRDVKIITLKSNLVSQFRKDFKFYKVREINDYHHAHDAYLNAVIGTALLKKYPKLASEFVYGEFKKYDVRKFIAKSDKEIGKATAKYFFYSNLMNFFKKEVKFADGTVVERPDIETSEDGEIAWNKQTDFKIVRKVLSYPQVNIVKKTEVQTHGLDRGKPRGLFNANPSPKPKPDSSENLVGIKRNLDPKKYGGYAGISNSYAVLVKAIIEKGVKKKETMVLEFQGISILDRITFEKDKRAFLLGKGYKDIKKIIELPKYSLFELKDGSRRMLASILSTNNKRGEIHKGNELFVPQKFTTLLYHAKRINNPINKDHIEYVKKHRDDFKELLNYVLEFNEKYVGATKNGERLKEAVADFDSKSNEEICTSFLGAVNSKNAGLFELTSLGSASDFEFLGVKIPRYRDYTPSSLLKDSILIHQSITGLYETRIDLSKLGED

SEQ ID NO: 588 - protein, 1367 aa, Streptococcus pyogenes MGAS1882
MDKKYSIGLDIGTNSVGWAVITDDYKVPSKKFKVLGNTDRHSIKKNLIGALLFGSGETAEATRLKRTARRRYTRRKNRICYLQEIFSNEMAKVDDSFFHRLEESFLVEEDKKHERHPIFGNIVDEVAYHEKYPTIYHLRKKLADSTDKADLRLIYLALAHMIKFRGHFLIEGDLNPDNSDVDKLFIQLVQIYNQLFEENPINASRVDAKAILSARLSKSRRLENLIAQLPGEKRNGLFGNLIALSLGLTPNFKSNFDLAEDAKLQLSKDTYDDDLDNLLAQIGDQYADLFLAAKNLSDAILLSDILRVNSEITKAPLSASMIKRYDEHHQDLTLLKALVRQQLPEKYKEIFFDQSKNGYAGYIDGGASQEEFYKFIKPILEKMDGTEELLVKLNREDLLRKQRTFDNGSIPHQIHLGELHAILRRQEDFYPFLKDNREKIEKILTFRIPYYVGPLARGNSRFAWMTRKSEETITPWNFEEVVDKGASAQSFIERMTNFDKNLPNEKVLPKHSLLYEYFTVYNELTKVKYVTEGMRKPAFLSGEQKKAIVDLLFKTNRKVTVKQLKEDYFKKIECFDSVEISGVEDRFNASLGAYHDLLKIIKDKDFLDNEENEDILEDIVLTLTLFEDRGMIEERLKTYAHLFDDKVMKQLKRRRYTGWGRLSRKLINGIRDKQSGKTILDFLKSDGFANRNFMQLIHDDSLTFKEDIQKAQVSGQGHSLHEQIANLAGSPAIKKGILQTVKIVDELVKVMGHKPENIVIEMARENQTTQKGQKNSRERMKRIEEGIKELGSQILKEHPVENTQLQNEKLYLYYLQNGRDMYVDQELDINRLSDYDVDHIVPQSFIKDDSIDNKVLTRSDKNRGKSDNVPSEEVVKKMKNYWRQLLNAKLITQRKFDNLTKAERGGLSELDKAGFIKRQLVETRQITKHVAQILDSRMNTKYDENDKLIREVKVITLKSKLVSDFRKDFQFYKVREINNYHHAHDAYLNAVVGTALIKKYPKLESEFVYGDYKVYDVRKMIAKSEQEIGKATAKYFFYSNIMNFFKTEITLANGEIRKRPLIETNGETGEIVWDKGRDFATVRKVLSMPQVNIVKKTEVQTGGFSKESILPKRNSDKLIARKKDWDPKKYGGFDSPTVAYSVLVVAKVEKGKSKKLKSVKELLGITIMERSSFEKNPIDFLEAKGYKEVKKDLIIKLPKYSLFELENGRKRMLASAGELQKGNELALPSKYVNFLYLASHYEKLKGSPEDNEQKQLFVEQHKHYLDEIIEQISEFSKRVILADANLDKVLSAYNKHRDKPIREQAENIIHLFTLTNLGAPAAFKYFDTTIDRKRYTSTKEVLDATLIHQSITGLYETRIDLSQLGGD

SEQ ID NO: 589 - protein, 1345 aa, Streptococcus mutans 8ID3
MKKPYSIGLDIGTNSVGWAVVTDDYKVPAKKMKVLGNTDKSHIEKNLLGALLFDSGNTAEDRRLKRTARRRYTRRRNRILYLQEIFSEEMGKVDDSFFHRLEDSFLVTEDKRGERHPIFGNLEEEVKYHENFPTIYHLRQYLADNPEKVDLRLVYLALAHIIKFRGHFLIEGKFDTRNNDVQRLFQEFLAVYDNTFENSSLQEQNVQVEEILTDKISKSAKKDRVLKLFPNEKSNGRFAEFLKLIVGNQADFKKHFELEEKAPLQFSKDTYEEELEVLLAQIGDNYAELFLSAKKLYDSILLSGILTVTDVGTKAPLSASMIQRYNEHQMDLAQLKQFIRQKLSDKYNEVFSDVSKDGYAGYIDGKTNQEAFYKYLKGLLNKIEGSGYFLDKIEREDFLRKQRTFDNGSIPHQIHLQEMRAIIRRQAEFYPFLADNQDRIEKLLTFRIPYYVGPLARGKSDFAWLSRKSADKITPWNFDEIVDKESSAEAFINRMTNYDLYLPNQKVLPKHSLLYEKFTVYNELIKVKYKTEQGKTAFFDANMKQEIFDGVFKVYRKVTKDKLMDFLEKEFDEFRIVDLTGLDKENKVFNASYGTYHDLCKILDKDFLDNSKNEKILEDIVLTLTLFEDREMIRKRLENYSDLLTKEQVKKLERRHYTGWGRLSAELIHGIRNKESRKTILDYLIDDGNSNRNFMQLINDDALSFKEEIAKAQVIGETDNLNQVVSDIAGSPAIKKGILQSLKIVDELVKIMGHQPENIVVEMARENQFTNQGRRNSQQRLKGLTDSIKEFGSQILKEHPVENSQLQNDRLFLYYLQNGRDMYTGEELDIDYLSQYDIDHIIPQAFIKDNSIDNRVLTSSKENRGKSDDVPSKDVVRKMKSYWSKLLSAKLITQRKFDNLTKAERGGLTDDDKAGFIKRQLVETRQITKHVARILDERFNTETDENNKKIRQVKIVTLKSNLVSNFRKEFELYKVREINDYHHAHDAYLNAVIGKALLGVYPQLEPEFVYGDYPHFHGHKENKATAKKFFYSNIMNFFKKDDVRTDKNGEIIWKKDEHISNIKKVLSYPQVNIVKKVEEQTGGFSKESILPKGNSDKLIPRKTKKFYWDTKKYGGFDSPIVAYSILVIADIEKGKSKKLKTVKALVGVTIMEKMTFERDPVAFLERKGYRNVQEENIIKLPKYSLFKLENGRKRLLASARELQKGNEIVLPNHLGTLLYHAKNIHKVDEPKHLDYVDKHKDEFKELLDVVSNFSKKYTLAEGNLEKIKELYAQNNGEDLKELASSFINLLTFTAIGAPATFKFFDKNIDRKRYTSTTEILNATLIHQSITGLYETRIDLNKLGGD

SEQ ID NO: 590 - protein, 1370 aa, Streptococcus agalactiae COH1
MNKPYSIGLDIGTNSVGYSVVTDDYKVPAKKMRVLGNTDKEYIKKNLIGALLFDGGNTASDRRLKRTARRRYTRRRNRILYLQEIFAEEMSKVDDSFFHRLEDSFLVEDDKRGSKYPIFATMQEEKDYHEKFPTIYHLRKELADKKEKANLRLVYLALAHIIKFRGHFLIEDDSFDVRNTDIQRQYQAFLEIFDTTFENNHLLSQNIDVEGILTDKISKSAKKDRILAQYPNQKSTGIFAEFLKLIVGNQADFKKHFNLEDKTPLQFAKDSYDEDLENLLGQIGDEFADLFSVAKKLYDSVLLSGILTVTDLSTKAPLSASMIQRYDEHREDLKQLKQFVKASLPEKYQEIFTDSSKDGYAGYIEGKTNQGAFYKYLSKLLTKQEGSEYFLEKIKNEDFLRKQRTFDNGSIPHQVHLTELKAIIRRQSEYYPFLKENLDRIEKILTFRIPYYVGPLAREKSDFAWMTRKTDDSIRPWNFEELVDKEASAEAFIHRMTNNDLYLPEEKVLPKHSLIYEKFTVYNELTKVRYKNEQGETYFFDSNIKQEIFDGVFKEHRKVSKKKLLDFLAKEYEEFRIVDVIGLDKENKAFNASLGTYHDLKKILDKDFLDNPDNESILEDIVQTLTLFEDREMIKKRLENYKDLFTESQLKKLYRRHYTGWGRLSAKLINGIRDKESQKTILDYLISDGRANRNFMQLIHDDGLSFKPIIDKAQAGSHSDNLKEVVGELAGSPAIKKGILQSLKIVDELVKVMGYEPEQVVVEMARENQTTNQGRRNTRQRYKLLEEGVKNLASDLNGNILKEYPTDNQALQNERLFLYYLQNGRDMYTGEALDIDNLSQYDIDHIVPQAFIKDDSIDNRVLVSSAKNRGKSDNVPSIDIVKARKAFWKKLLDAKLMSQRKYDNLTKAERGGLTSDDKARFIQRQLVETRQITKHVARILDERFNNELDSKGRRIRKVKIVTLKSNLVSNFRKEFGFYKIREVNDYHHAHDAYLNAVVAKAILTKYPQLEPEFVYGDYPKYNSYKTRKSATEKLFFYSNIMNFFKTKVTLADGTVVVKDDIEVNNDTGEIVWDKKKHFATVRKVLSYPQVNIVKKTEIQTGGFSKESILAHGNSDKLIPRKTKDIYLDPKKYGGFDSPIVAYSVLVVADIKKGKAQKLKTVTELLGITIMERFRFEKNPSAFLESKGYLNIRDDKLMILPKYSLFELENGRRRLLASAGELQKGNELALPTQYMKFLYLASRYNELKGKPEEIEQKQEFVVQHVSYFDDILQIINDFSNRVILADANLEKINKLYQDNKENISVDELANNIINLFTFTSLGAPAAFKFFDKIVDRKRYTSTKEVLNSTLIHQSITGLYETRIDLGKLGED

SEQ ID NO: 591 - protein, 1385 aa, Streptococcus salivarius K12
MTKPYSIGLDIGTNSVGWAVITDDYKVPSKKMKVLGNTSKKYIKKNLLGALLFDSGITAEGRRLKRTARRRYTRRRNRILYLQEIFSTEMATLDDAFFQRLDDSFLVPDDKRDSKYPIFGNLVEEKVYHDEFPTIYHLRKHLADSSKKADLRLVYLALAHMIKYRGHFLIEGDFNSKNNDLQKNFQDFLDTYNAIFESDLSLENSKQLEEIVKDKISKSAKKDRILKLFPGEKNSGIFSEFLKLIVGNQADFRKYFNLDEKTSLQFSKESYDEDLETLLGHIGDDYSDVFLKAKKLYDAILLSGILTVTDNGTEAPLSSAMIMRYKEHEEDLALLKAYIRNISLETYNEVFKDNTKNGYAGYIDGKTSQEDFYVYLKRLLAGLEGADYFLEKIDREDFLRKQRTFDNGSIPYQIYLQEMRAILDKQAKFYPFLAKNKERIEKILTFRIPYYVGPLARGNSDFAWSIRKRNEKITPWNFEDVIDKESSAEAFINRMTSFDLYLPEEKVLPKHSLLYENFTVYNELTKVRFIAEGMRDYQFLDSKQKKDIVRLYFKGKRKVTDKDIIEYLHAIDGYDGIELKGIEKQFNSSLSTYHDLLNIINDKEFLDDSSNETIIEEIIHTLTMFEDREMIKQRLSKFDNIFDKSVLKKLSRRHYTGWGKLSAKLINGIRDEKSGNTILDYLIDDGVSNRNFMQLIHDDALSFKKKIKKAQIIGDKDNIKQVVKSLPGSPAIKKGILQSIKIVDELVKVMGREPESIVVEMARENQYTNQGKSNSQQRLKRLEESLKGLGSKILKENVPTRLSKIDNNALQNDRLYLYYLQNGKDMYTGEELDIDRLSNYDIDHIIPQAFLKDDSIDNKVLVSSASNRGKSDDVPSLEVVKKRKTLWYQLLKSKLISQRKFDNLTKAERGGLSQEEKAGFIQRQLVETRQITKHVARLLDERFNNKKDENNRTLRTVKIITLKSSLVSQFRKDFELYKVREINDFHHAHDAYLNAVVASALLKKYPKLEPEFVYGDYPKYNSFRERKSATEKVYFYSNIMNIFKKSIPLADGTVIDRPLIEVNEETGESVWNKVADLNTVRKVLSYSQVNIVKKVEEQNHGLDRGKPKGLFNANLSSKPKPNSKENLVGAKEYLDPKKYGGYAGISNSFAILVKGTIEKGAKKKITNVLEFQGISILDRIYYRKDKLNFLLEKGYKDIELIIELPKYSLFELSDGSRRMLASILSTNNKRGEIHKGNQIFISQKFVKLLYHAKRISSTFNENHRKYVENHKKEFEELFYYILEFNENYVGAKKNGELLKSAFQSWQNHSIDELCSSFIGPTGSERKGLFELTSRGGAADFEFLGVKIPRYRDYTPSSLLKDATLIHQSVTGLYETRIDLGKLGED

SEQ ID NO: 592 - protein, 1392 aa, Streptococcus sanguinis SK330
MENKNYSIGLDIGTNSVGWAVITDDYKVPSKKMKVFGNTDKHFIKKNLIGALLFDEGATAEDRRLKRTARRRYTRRKNRLRYLQEIFSEEISKLDSSFFHRLDDSFLVPKDKRGSKYPIFATLEEEKEYHKKFPTIYHLRKHLADSKEKTDLRLIYLALAHMIKYRGHFLYEESFDIKNNDIQKIFNEFISIYDNTFEGSSLSGQNAQVEAIFTDKISKSAKRERVLKLFSDEKSTSLFSEFLKLIVGNQADFKKHFDLEEKAPLQFSKDTYDEDLENLLGQIGDGFTDLFLVAKKLYDAILLSGILTVTDPSTKAPLSASMIERYESHQKDLAALKQFIKNNLPKRYNEVFSDQSKDGYAGYIDGKTTQEAFYKYIKNLLSKFEGADYFLDKIEREDFLRKQRTFDNGSIPHQIHLQEMNAILRRQGEHYPFLKENREKIEKILTFRIPYYVGPLARGNRDFAWLTRNSDQAIRPWNFEEIVDKASSAEEFINKMTNYDLYLPEEKVLPKHSLLYETFAVYNELTKVKFIAEGLRDYQFLDSGQKKQIVNQLFKEKRKVTEKDIIHYLHNVDGYDGIELKGIEKQFNASLSTYHDLLKIIKDKEFMDDPKNEEILENIVHTLTIFEDREMIKQRLAQYDSIFDEKVIKALTRRHYTGWGKLSAKLINGICDKQTGDTILDYLIDDGKINRNFMQLINDDGLSFKEIIQKAQVVGKTDDVKQVVQELPGSPAIKKGILQSIKIVDELVKVMGYAPESIVIEMARENQTTARGKKNSQQRYKRIEDSLKNLAPGLDSNILKENPTDNIQLQNDRLFLYYLQNGKDMYTGKPLDIDQLSSYDIDHIIPQAFIKDDSIDNRVLTSSKDNRGKSDNVPSLEVVQKRKAFWQQLLDSKLISERKFNNLTKAERGGLDERDKVGFIRRQLVETRQITKHVAQILDASFNTEVNEKNQKIRTVKIITLKSNLVSNFRKEFELYKVREINDYHHAHDAYLNAVVAKAILKKYPKLEPEFVYGDYQKYDLKRYISRFKPSKEIEKATEKYFFYSNLLNFFKEEVHYADGIIVKRENIEYSKDTGEIAWNKEKDFATIKKVLSYPQVNIVKKTEIQTHGLDRGKPKGLFNSNPSPKPSEDSKENLVPIKQGLDPRKYGGYAGISNSYAVLVKAIVEKGAKKQQKTILEFQGISILDKINFENNKENYLLKKRYIEILSTITLPKYSLFEFPDGTRRRLASILSTNNKRGEIHKGNELVLPGKYTTLLYHAKNINKKLEPEHLEYVEKHRNDFAKLLECVLNFNDKYVGALKNGERIRQAFTDWETVDIEKLCFSFIGPENSKNAGLFELTSQGSASDFEFLGVKIPRYRDYAPSSLLKATLIHQSITGLYETRIDLSKLGED

SEQ ID NO: 593 - protein, 1371 aa, Streptococcus sp. oral taxon 056 str. F0418
MNNNNYSIGLDIGTNSVGWAVITDDYKVPSKKMRVLGNTDKRFIKKNLIGALLFDEGTTAEDRRLKRTARRRYTRRKNRLRYLQEIFAEEMSKVDSSFFHRLDDSFLVPEDKSGSKYPIFATLAEEKEYHKKFPTIYHLRKHLADSKEKADLRLIYLALAHITKYRGHFLYEEAFDIKNNDIQKIFNEFINIYDNTFEGSSLSGQNAQVEAIFTGKISKSVKREHVLKLFPDEKSTGLFSEFLKLIVGNQADFKKHFDLEEKASLQFSKDTYDEDLENLLGQIGDDFADLFLVAKKLYDAILLSGILTVTDPSTKAPLSASMIERYENHQEDLAALKQFIKNNLPEKYAEVFSDQSKDGYAGYIDGKTTQEAFYKYIKNLLSKFEGADYFLDKIEREDFLRKQRTFDNGSIPHQIHLQEMNAILRRQGEHYPLLKENKEKIEKILTFRIPYYVGPLARGNRDFAWLTRNSDQAIRPWNFEEIVDKASSAESFINKMTNYDLYLPEEKVLPKHSLLYETFAVYNELTKVKFIAEGLRDYQFFDSGQKKQIVNQLFKEKRKVTEKDIIHYLHNVDGYDGIELKGIEKQFNASLSTYHDLLKIIKDKEFMDNHKNQEILENIVHTLTIFEDREMIKQRLAQYDSIFDEKVIKALTRRHYTGWGKLSAKLINGICDKKTGKTILDYLIDDGYNNRNFMQLINDDGLSFKEIIQKAQVVGKTDDLTQVVRELSGSPAIKKGILQSIKIVDELVKIMGYAPESIVIEMARENQTTAKGKKNSQQRYKRIEDALKNLAPGLDSTISKENPTDNIQLQNDRLFLYYLQNGKDMYTGEALDINQLSSYDIDHIIPQAFIKDDSLDNRVLTSSKDNRGKSDNVPSLEVVKKRKAFWQQLLDSKLISERKFNNLTKAERGGLDERDKVGFIKRQLVETRQITKHVARILDARFNTEVSEKNQKIRSVKIITLKSNLVSNFRKEFKLYKVREINDYHHAHDAYLNAVVAKAILKKYPKLEPEFVYGDYQKYDLKRYISKSKDPKEVEKATEKYFFYSNLLNFFKEEVHYADGTIVKRENIEYSKDTGEIAWNKEKDFVTIKKVLSYPQVNIVKKREVQTGGFSKESILPKGNSDKLIPRKTKDILWDTTKYGGFDSPVIAYSILLIADIEKGKAKKLKTVKTLVGITIMEKAAFEKNPITFLENKGYHNVRKENILCLPKYSLFELENGRRRLLASAKELQKGNEIVLPVYLTTLLYHSKNVHKLDEPEHLEYIQKHRYEFKDLLNLVSEFSQKYVLAEANLEKIKSLYVDNEQADIEILANSFINLLTFTALGAPAAFKFFGKDVDRKRYTTVSEILNATLIHQSITGLYETRIDLSKLGED

SEQ ID NO: 594 - protein, 1370 aa, Streptococcus gallolyticus subsp. gallolyticus TX20005
MTKKNYSIGLDIGTNSVGWAVITDDYKVPAKKMKVLGNTDKKYIKKNLLGALLFDSGETAEATRLKRTARRRYTRRKNRLRYLQEIFAEEMTKVDESFFYRLDESFLTTDEKDFERHPIFGNKAEEDAYHQKFPTIYHLRNYLADSSEKADLRLVYLALAHMIKYRGHFLIEGKLNAENTDVQKLFTDFVGVYDRTFDDSHLSEITVDVASTLTEKISKSRRLENLIKYYPTEKKNTLFGNLIALALGLQPNFKMNFKLSEDAKLQFSKDTYEEDLEELLGKIGDDYADLFTSAKNLYDAILLSGILTVDDNSTKAPLSASMIKRYVEHHEDLEKLKEFIKANKSELYHDIFKDKNKNGYAGYIENGVKQDEFYKYLKNTLSKIDGSDYFLDKIEREDFLRKQRTFDNGSIPHQIHLQEMHAILRRQGDYYPFLKEKQDRIEKILTFRIPYYVGPLVRKDSRFAWAEYRSDEKITPWNFDKVIDKEKSAEKFITRMTLNDLYLPEEKVLPKHSHVYETYAVYNELTKIKYVNEQGKESFFDSNMKQEIFDHVFKENRKVTKEKLLNYLNKEFPEYRIKDLIGLDKENKSFNASLGTYHDLKKILDKAFLDDKVNEEVIEDIIKTLTLFEDKDMIHERLQKYSDIFTANQLKKLERRHYTGWGRLSYKLINGIRNKENNKTILDYLIDDGSANRNFMQLINDDTLPFKQIIQKSQVVGDVDDIEAVVHDLPGSPAIKKGILQSVKIVDELVKVMGDNPDNIVIEMARENQTTNRGRSQSQQRLKKLQSSLKELGSNILNEEKPSYIEDKVENSHLQNDQLFLYYIQNGKDMYTGDELDIDHLSDYDIDHIIPQAFIKDDSIDNRVLTSSAKNRGKSDDVPSLDIVRARKAEWVRLYKSGLISKRKFDNLTKAERGGLTEADKAGFIKRQLVETRQITKHVAQILDARFNTEHDENDKVIRDVKVITLKSNLVSQFRKDFEFYKVREINDYHHAHDAYLNAVVGTALLKKYPKLASEFVYGEYKKYDIRKFITNSSDKATAKYFFYSNLMNFFKTKVKYADGTVFERPIIETNADGEIAWNKQIDFEKVRKVLSYPQVNIVKKVETQTGGFSKESILPKGDSDKLIPRKTKKVYWDTKKYGGFDSPTVAYSVFVVADVEKGKAKKLKTVKELVGISIMERSFFEENPVEFLENKGYHNIREDKLIKLPKYSLFEFEGGRRRLLASASELQKGNEMVLPGYLVELLYHAHRADNFNSTEYLNYVSEHKKEFEKVLSCVEDFANLYVDVEKNLSKIRAVADSMDNFSIEEISNSFINLLTLTALGAPADFNFLGEKIPRKRYTSTKECLTATLIHQSITGLYETRIDLSKLGEE

SEQ ID NO: 595 - protein, 1371 aa, Streptococcus dysgalactiae subsp. equisimilis RE378
MDKKYSIGLDIGTNSVGWAVITDDYKVPSKKFKVLGNTDRHSIKKNLIGALLFDSGETAEATRLKRTARRRYTRRKNRIRYLQEIFSSEMSKVDDSFFHRLEESFLVEEDKKHERHPIFGNIVDEVAYHEKYPTIYHLRKKLADSTDKADLRLIYLALAHMIKFRGHFLIEGDLNPDNSDMDKLFIQLVQTYNQLFEENPINASRVDAKAILSARLSKSRRLENLIAQLPGEKRNGLFGNLIALSLGLTPNFKSNFDLAEDAKLQLSKDTYDDDLDNLLAQIGDQYADLFLAAKNLSDAILLSDILRVNSEITKAPLSASMIKRYDEHHQDLTLLKALVRQQLPEKYKEIFFDQSKNGYAGYIDGGASQEEFYKFIKPILEKMDGTEELLAKLNREDLLRKQRTFDNGSIPHQIHLGELHAILRRQEDFYPFLKDNREKIEKILTFRIPYYVGPLARGNSRFAWMTRKSEETITPWNFEEVVDKGASAQSFIERMTNFDKNLPNEKVLPKHSLLYEYFTVYNELTKVKYVTEGMRKPEFLSGKQKEAIVDLLFKTNRKVTVKQLKEDYFKKIECFDSVEISGVEDRFNASLGTYHDLLKIIKDKDFLDNEENEDILEDIVLTLTLFEDKEMIEERLKTYAHLFDDKVMKQLKRRHYTGWGRLSRKLINGIRDKQSGKTILDFLKSDGFANRNFIQLIHDDSLTFKEAIQKAQVSGQGHSLHEQIANLAGSPAIKKGILQSVKVVDELVKVMGHKPENIVIEMARENQTTQKGQKNSRERMKRIEEGIKELGSQILKEHPVENTQLQNEKLYLYYLQNGRDMYVDQELDINRLSDYDVDHIVPQSFIKDDSIDNKVLTRSDKNRGKSDDVPSEEVVKKMKNYWRQLLNAKLITQRKFDNLTKAERGGLSELDKAGFIKRQLVETRQITKHVAQILDSRMNTKYDENDKLIREVKVITLKSKLVSDFRKDFQFYKVREINNYHHAHDAYLNAVVGTALIKKYPKLESEFVYGDYKVYDVRKMIAKSEQEIGKATAKRFFYSNIMNFFKTEITLANGEIRKRPLIETNEETGEIVWNKGRDFATVRKVLSMPQVNIVKKTEVQTGALTNESIYARGSFDKLISRKHRFESSKYGGFGSPTVTYSVLVVAKSKVQDGKVKKIKTGKELIGITLLDKLVFEKNPLKFIEDKGYGNVQIDKCIKLPKYSLFEFENGTRRMLASVMANNNSRGDLQKANEMFLPAKLVTLLYHAHKIESSKELEHEAYILDHYNDLYQLLSYIERFASLYVDVEKNISKVKELFSNIESYSISEICSSVINLLTLTASGAPADFKFLGTTIPRKRYGSPQSILSSTLIHQSITGLYETRIDLSQLGGD

SEQ ID NO: 596 - protein, 1370 aa, Streptococcus agalactiae SS1219; identical to SEQ ID NO: 580

SEQ ID NO: 597 - protein, 1345 aa, Streptococcus mutans NCTC 11060
MKKPYSIGLDIGTNSVGWAVVTDDYKVPAKKMKVLGNTDKSHIKKNLLGALLFDSGNTAEDRRLKRTARRRYTRRRNRILYLQEIFSEEMGKVDDSFFHRLEDSFLVTEDKRGERHPIFGNLEEEVKYHENFPTIYHLRQYLADNPEKTDLRLVYLALAHIIKFRGHFLIEGKFDTRNNDVQRLFQEFLAVYDNTFENSSLQEQNVQVEEILTDKISKSAKKDRVLKLFPNEKSNGRFAEFLKLIVGNQADFKKHFELEEKAPLQFSKDIYEEELEVLLAQIGDNYAELFLSAKKLYDSILLSGILTVTDVSTKAPLSASMIQRYNEHQMDLAQLKQFIRQKLSDKYNEVFSDVSKDGYAGYIDGKTNQEAFYKYLKGLLNKIEGSGYFLDKIEREDFLRKQRTFDNGSIPHQIHLQEMRAIIRRQAEFYPFLADNQDRIEKILTFRIPYYVGPLARGKSDFAWLSRKSADKITPWNFDEIVDKESSAEAFINRMTNYDLYLPNQKVLPKHSLLYEKFTVYNELTKVKYKTEQGKTAFFDANMKQEIFDGVFKVYRKVTKDKLMDFLEKEFDEFRIVDLTGLDKENKAFNASYGTYHDLRKILDKDFLDNSKNEKILEDIVLTLTLFEDREMIRKRLENYSDLLTKEQVKKLERRHYTGWGRLSAELIHGIRNKESRKTLLDYLIDDGNSNRNFMQLINDDALSFKEEIAKAQVIGETDNLNQVVSDIAGSPAIKKGILQSLKIVDELVKIMGHQPENIVVEMARENQFTNQGQRNSQQRLKGLTDSIKEFGSQILKEHPVENSQLQNDRLFLYYLQNGRDMYTGEELDIDYLSQYDIDHIIPQAFIKDNSIDNRVLTSSKENRGKSDDVPSKDVVRKMKSYWSKLLSAKLITQRKFDNLTKAERGGLTDDDKAGFIKRQLVETRQITKHVARILDERFNTETDENNKKIRQVKIVTLKSNLVSNFRKEFELYKVREINDYHHAHDAYLNAVIGKALLGVYPQLEPEFVYGDYPHFHGHKENKATAKKFFYSNIMNFFKKDDVRTDKNGEIIWKKDEYISNIKKVLSYPQVNIVKKVEEQTGGFSKESILPKGDSDKLIPRKTKKFYWDTKKYGGFDSPIVAYSILVIADIEKGKSKKLKTVKALVGVTIMEKMTFERDPVAFLERKGYRNVQEENIIKLPKYSLFKLENGRKRLLASARELQKGNEIVLPDHLGTLLYHAKNIHKVDEPKHLDYVDKHKDEFKELLDVVSNFSKKYTLAEGNLEKIKELYAQNNGEDLKELASSFINLLTFTAIGAPATFKFFDKNIDRKRYTSTTEILNATLIHQSITGLYETRIDLSKLGGD

SEQ ID NO: 598 - protein, 1345 aa, Streptococcus mutans 4SM1
MKKPYSIGLDIGTNSVGWAVVTDDYKVPAKKMKVLGNTDKSHIKKNLLGALLFDSGNTAEDRRLKRTARRRYTRRRNRILYLQEIFSEEMGKVDDSFFHRLEDSFLVTEDKRGERHPIFGNLEEEVKYHENFPTIYHLRQYLADNPEKVDLRLVYLALAHIIKFRGHFLIEGKFDTRNNDVQRLFQEFLAVYDNTFENSSLQEQNVQVEEILTDKISKSAKKDRVLKLFPNEKSNGRFAEFLKLIVGNQADFKKHFELEEKAPLQFSKDTYEEDLEELLGKIGDDYADLFTLAKNLYDAILLSGILTADDSSTKAPLSASMIQRYNEHQMDLAQLKQFIRQKLSDKYNEVFSDVSKDGYAGYIDGKTNQEAFYKYLKGLLNKIEGSGYFLDKIEREDFLRKQRTFDNGSIPHQIHLQEMRAIIRRQAEFYPFLADNQDRIEKILTFRIPYYVGPLARGKSDFAWLSRKSADKITPWNFDEIVDKESSAEAFINRMTNYDLYLPNQKVLPKHSLLYEKFTVYNELTKVKYKTEQGKTAFFDANMKQEIFDGVFKVYRKVTKDKLMDFLEKEFDEFRIVDLTGLDKENKVFNASYGTYHDLCKILDKDFLDNSKNEKILEDIVLTLTLFEDREMIRKRLENYSDLLTKEQVKKLERRHYTGWGRLSAELIHGIRNKESRKTILDYLIDDGNSNRNFMQLINDDALSFKEEIAKAQVIGETDNLNQVVSDIAGSPAIKKGILQSLKIVDELVKIMGHQPENIVVEMARENQFTNQGRRNSQQRLKGLTDSIKEFGSQILKEHPVENSQLQNDRLFLYYLQNGRDMYTGEELDIDYLSQYDIDHIIPQAFIKDNSIDNRVLTSSKENRGKSDDVPSKDVVRKMKPYWSKLLSAKLITQRKFDNLTKAERGGLTDDDKAGFIKRQLVETRQITKHVARILDERFNTETDENNKKIRQVKIVTLKSNLVSNFRKEFELYKVREINDYHHAHDAYLNAVIGKALLGVYPQLEPEFVYGDYPHFHGHEENKATAKKFFYSNIMNFFKKDDVRTDKNGEIIWKKDEHISNIKKVLSYPQVNIVKKVEEQTGGFSKESILPKGNSDKLIPRKTKKFYWDTKKYGGFDSPIVAYSILVIADIEKGKSKKLKTVKALVGVTIMEKMTFERDPVAFLERKGYRNVQEENIIKLPKYSLFKLENGRKRLLASARELQKGNEIVLPNHLGTLLYHAKNIHKVDEPKHLDYVDKHKDEFKELLDVVSNFSKKYTLAEGNLEKIKELYAQNNGEDLKELASSFINLLTFTAIGAPATFKFFDKNIDRKRYTSTTEILNATLIHQSITGLYETRIDLSKLGGD

SEQ ID NO: 599 - protein, 1377 aa, Streptococcus sanguinis SK115
MKKPYSIGLDIGTNSVGWAVITDDYKVPSKKMKVLGNTDKHFIKKNLIGALLFDEGTTAEDRRLKRTSRRRYTRRKNRLRYLQEIFSEEISKLDSSFFHRLDDSFLVPEDKRGSKYPIFATLEEEKEYHKKFPTIYHLRKHLADSKEKTDLRLIYLALAHMIKYRGHFLYEESFDIKNNDIQKIFNEFISIYDNTFEGSSLSGQNAQVEAIFTDKISKSTKRERVLKLFSDEKSTGLFSEFLKLIVGNQADFKKHFDLEEKAPLQFSKDTYDEDLENLLGQIGDGFADLFLVAKKLYDAILLSGILTVTDPSTKAPLSASMIERYENHQEDLAALKQFIKNNLSEKYAEVFSDQSKDGYAGFIDGKTTQEAFYKYIKNLLSKLEGADYFLNKIEREDFLRKQRTFDNGSIPHQIHLQEMNAILRRQGEHYLFLKENREKIEKILAFRIPYYVGPLARGNRDFAWLTRNSDQAIRPWNFEEVVDKASSAEDFINKMTNYDLYLPEEKVLPKHSLLYETFAVYNELTKVKFIAEGLRDYQFLDSGQKKQIVNQLFKDKRKVTEKDIIHYLHNVDGYDGIELKGIEKQFNASLSTYHDLLKIIKDKEFMDNPKNGEILENIIHTLTIFEDREMIKQRLAQYDTLFDEKVIKALTRRHYTGWGKLSAKLINGIRDKQTGKTILEYLIDDGDCNRNFMQLINDDGLSFKEIIQKAQVVGKTDDVKQVVQEIPGSPAIKKGILQSIKIVDELVKVMGHNPESIVIEMARENQTTAKGKKNSQQRYKRIEDALKNLAPGLDSNILKENPTDNIQLQNDRLFLYYLQNGKDMYTGKAIDINQLSNYDIDHIIPQAFIKDDSLDNRVLTSSKDNRGKSDNVPSIEVVQKRKAFWQQLLDSKLISERKFNNLTKAKRGGLDERDKVGFIKRQLVETRQITKHVAQLLDTRFNTEVNEENQKIRTVKIITLKSNLVSNFRKEFGLYKVREINDYHHAHDAYLNAVVAKAILKKYPKLEPEFVYGDYQKYDLKRYILKSKASNTIDKATEKYFFYSNLLNFFKEKVRYADGTIKKRENIEYSNDTGEIAWNKEKDFATIKKVLSLPQVNIVKKTEEQTVGQNGGLFDNNIVSKKKVVDASKLIPIKSSLSPEKYGGYARPTIAYSVLVIADIEKGKGKAKKLKRIKEIVGITIQDKKKFESNPVTYLEECGYKNINSNLIIKLPKYSLFEFNDGQRRLLASSIELQKGNELILPYHLTALLYHAQRINKISEPIHKQYVEAHQNEFKELLTTIISLSKKYIQKPNVELLLQQAFDQADKDIYQLSESFISLLKLTSFGAPGAFKFLGVEISQSSVRYKPNSQFLDTTLIHQSITGLYETRIDLSKLGED

SEQ ID NO: 600 - protein, 1345 aa, Streptococcus mutans 2VS1
MKKPYSIGLDIGTNSVGWAVVTDDYKVPAKKMKVLGNTDKSHIKKNLLGALLFDSGNTAADRRLKRTARRRYTRRRNRILYLQEIFAEEMSKVDDSFFHRLEDSFLVTEDKRGERHPIFGNLEEEVKYHENFPTIYHLRQYLADNPEKVDLRLVYLALAHIIKFRGHFLIEGKFDTRNNDVQRLFQEFLAVYDNTFENSSLQEQNVQVEEILTDKISKSAKKDRVLKLFPNEKSNGRFAEFLKLIVGNQADFKKHFELEEKAPLQFSKDTYEEELEVLLAQIGDNYAELFLSAKKLYDSILLSGILTVTDVSTKAPLSASMIQRYNEHQMDLAQLKQFIRQKLSDKYNEVFSDVSKDGYAGYIDGKTNQEAFYKYLKGLLNKIEGSGYFLDKIEREDFLRKQRTFDNGSIPHQIHLQEMRAIIRRQAEFYPFLADNQDRIEKILTFRIPYYVGPLARGKSDFAWLSRKSADKITPWNFDEIVDKESSAEAFINRMTNYDLYLPNQKVLPKHSLLYEKFTVYNELTKVKYKTEQGKTAFFDANMKQEIFDGVFKVYRKVTKDKLMDFLEKEFDEFRIVDLTGLDKENKAFNASYGTYHDLRKILDKDFLDNSKNEKILEDIVLTLTLFEDREMIRKRLENYSDLLTKEQVKKLERRHYTGWGRLSAELIHGIRNKESRKTILDYLIDDGNSNRNFMQLINDDALSFKEEIAKAQVIGETDNLNQVVSDIAGSPAIKKGILQSLKIVDELVKIMGHQPENIVVEMARENQFTNQGRRNSQQRLKGLTDSIKEFGSQILKEHPVEHSQLQNDRLFLYYLQNGRDMYTGEELDIDYLSQYDIDHIIPQAFIKDNSIDNRVLTSSKENRGKSDDVPSKNVVRKMKSYWSKLLSAKLITQRKFDNLTKAERGGLTDDDKAGFIKRQLVETRQITKHVARILDERFHTETDENNKKIRQVKIVTLKSNLVSNFRKEFELYKVREINDYHHAHDAYLNAVIGKALLGVYPQLEPEFVYGDYPHFHGHKENKATAKKFFYSNIMNFFKKDDVRTDKNGEIIWKKDEHISNIKKVLSYPQVNIVKKVEEQTGGFSKESILPKGNSDKLIPRKTKKFYWDTKKYGGFDSPIVAYSILVIADIEKGKSKKLKTVKALVGVTIMEKMTFERDPVAFLERKGYRNVQEENIIKLPKYSLFKLENGRKRLLASARELQKGNEIVLPNHLGTLLYHAKNIHKVDEPKHLDYVDKHKDEFKELLDVVSNFSKKYTLAEGNLEKIKELYAQNNGEDLKELASSFINLLTFTAIGAPATFKFFDKNIDRKRYTSTTEILNATLIHQSITGLYETRIDLSKLGGD

SEQ ID NO: 601 - protein, 1368 aa, Streptococcus pyogenes M1 476
MDKKYSIGLDIGTNSVGWAVITDDYKVPSKKFKVLGNTDRHSIKKNLIGALLFDSGETAEATRLKRTARRRYTRRKNRICYLQEIFSNEMAKVDDSFFHRLEESFLVEEDKKHERHPIFGNIVDEVAYHEKYPTIYHLRKKLVDSTDKADLRLIYLALAHMIKFRGHFLIEGDLNPDNSDVDKLFIQLVQTYNQLFEENPINASGVDAKAILSARLSKSRRLENLIAQLPGEKKNGLFGNLIALSLGLTPNFKSNFDLAEDAKLQLSKDTYDDDLDNLLAQIGDQYADLFLAAKNLSDAILLSDILRVNTEITKAPLSASMIKRYDEHHQDLTLLKALVRQQLPEKYKEIFFDQSKNGYAGYIDGGASQEEFYKFIKPILEKMDGTEELLVKLNREDLLRKQRTFDNGSIPHQIHLGELHAILRRQEDFYPFLKDNREKIEKILTFRIPYYVGPLARGNSRFAWMTRKSEETITPWNFEEVVDKGASAQSFIERMTNFDKNLPNEKVLPKHSLLYEYFTVYNELTKVKYVTEGMRKPAFLSGEQKKAIVDLLFKTNRKVTVKQLKEDYFKKIECFDSVEISGVEDRFNASLGTYHDLLKIIKDKDFLDNEENEDILEDIVLTLTLFEDREMIEERLKTYAHLFDDKVMKQLKRRRYTGWGRLSRKLINGIRDKQSGKTILDFLKSDGFANRNFMQLIHDDSLTFKEDIQKAQVSGQGDSLHEHIANLAGSPAIKKGILQTVKVVDELVKVMGRHKPENIVIEMARENQTTQKGQKNSRERMKRIEEGIKELGSQILKEHPVENTQLQNEKLYLYYLQNGRDMYVDQELDINRLSDYDVDHIVPQSFLKDDSIDNKVLTRSDKNRGKSDNVPSEEVVKKMKNYWRQLLNAKLITQRKFDNLTKAERGGLSELDKAGFIKRQLVETRQITKHVAQILDSRMNTKYDENDKLIREVKVITLKSKLVSDFRKDFQFYKVREINNYHHAHDAYLNAVVGTALIKKYPKLESEFVYGDYKVYDVRKMIAKSEQEIGKATAKYFFYSNIMNFFKTEITLANGEIRKRPLIETNGETGEIVWDKGRDFATVRKVLSMPQVNIVKKTEVQTGGFSKESILPKRNSDKLIARKKDWDPKKYGGFDSPTVAYSVLVVAKVEKGKSKKLKSVKELLGITIMERSSFEKNPIDFLEAKGYKEVKKDLIIKLPKYSLFELENGRKRMLASAGELQKGNELALPSKYVNFLYLASHYEKLKGSPEDNEQKQLFVEQHKHYLDEIIEQISEFSKRVILADANLDKVLSAYNKHRDKPIREQAENIIHLFTLTNLGAPAAFKYFDTTIDRKRYTSTKEVLDATLIHQSITGLYETRIDLSQLGGD

SEQ ID NO: 602 - protein, 1345 aa, Streptococcus mutans U2B
MKKPYSIGLDIGTNSVGWAVVTDDYKVPAKKMKVLGNTDKSHIEKNLLGALLFDSGNTAEDRRLKRTARRRYTRRRNRILYLQEIFSEEMGKVDDSFFHRLEDSFLVTEDKRGERHPIFGNLEEEVKYHENFPTIYHLRQYLADNPEKVDLRLVYLALAHIIKFRGHFLIEGKFDTRNNDVQRLFQEFLAVYDNTFENSSLQEQNVQVEEILTDKISKSAKKDRVLKLFPNEKSNGRFAEFLKLIVGNQADFKKHFELEEKAPLQFSKDTYEEELEVLLAQIGDNYAELFLSAKKLYDSILLSGILTVTDVGTKAPLSASMIQRYNEHQMDLAQLKQFIRQKLSDKYNEVFSDVSKDGYAGYIDGKTNQEAFYKYLKGLLNKIEGSGYFLDKIEREDFLRKQRTFDNGSIPHQIHLQEMRAIIRRQAEFYPFLADNQDRIEKLLTFRIPYYVGPLARGKSDFAWLSRKSADKITPWNFDEIVDKESSAEAFINRMTNYDLYLPNQKVLPKHSLLYEKFTVYNELTKVKYKTEQGKTAFFDANMKQEIFDGVFKVYRKVTKDKLMDFLEKEFDEFRIVDLTGLDKENKVFNASYGTYHDLCKILDKDFLDNSKNEKILEDIVLTLTLFEDREMIRKRLENYSDLLTKEQVKKLERRHYTGWGRLSAELIHGIRNKESRKTILDYLIDDGNSNRNFMQLINDDALSFKEEIAKAQVIGETDNLNQVVSDIAGSPAIKKGILQSLKIVDELVKIMGHQPENIVVEMARENQFTNQGRRNSQQRLKGLTDSIKEFGSQILKEHPVENSQLQNDRLFLYYLQNGRDMYTGEELDIDYLSQYDIDHIIPQAFIKDNSIDNRVLTSSKENRGKSDDVPSKDVVRKMKSYWSKLLSAKLITQRKFDNLTKAERGGLTDDDKAGFIKRQLVETRQITKHVARILDERFNTETDENNKKIRQVKIVTLKSNLVSNFRKEFELYKVREINDYHHAHDAYLNAVIGKALLGVYPQLEPEFVYGDYPHFHGHKENKATAKKFFYSNIMNFFKKDDVRTDKNGEIIWKKDEHISNIKKVLSYPQVNIVKKVEEQTGGFSKESILPKGNSDKLIPRKTKKFYWDTKKYGGFDSPIVAYSILVIADIEKGKSKKLKTVKALVGVTIMEKMTFERDPVAFLERKGYRNVQEENIIKLPKYSLFKLENGRKRLLASARELQKGNEIVLPNHLGTLLYHAKNIHKVDEPKHLDYVDKHKDEFKELLDVVSNFSKKYTLAEGNLEKIKELYAQNNGEDLKELASSFINLLTFTAIGAPATFKFFDKNIDRKRYTSTTEILNATLIHQSITGLYETRIDLNKLGGD

SEQ ID NO: 603 - protein, 1345 aa, Streptococcus mutans M2A
MKKPYSIGLDIGTNSVGWAVVTDDYKVPAKKMKVLGNTDKSHIKKNLLGALLFDSGNTAEDRRLKRTARRRYTRRRNRILYLQEIFSEEMGKVDDSFFHRLEDSFLVTEDKRGERHPIFGNLEEEVKYHENFPTIYHLRQYLADNPEKTDLRLVYLALAHIIKFRGHFLIEGKFDTRNNDVQRLFQEFLAVYDNTFENSSLQEQNVQVEEILTDKISKSAKKDRVLKLFPNEKSNGRFAEFLKLIVGNQADFKKHFELEEKAPLQFSKDIYEEELEVLLAQIGDNYAELFLSAKKLYDSILLSGILTVTDVSTKAPLSASMIQRYNEHQMDLAQLKQFIRQKLSDKYNEVFSDVSKDGYAGYIDGKTNQEAFYKYLKGLLNKIEGSGYFLDKIEREDFLRKQRTFDNGSIPHQIHLQEMRAIIRRQAEFYPFLADNQDRIEKILTFRIPYYVGPLARGKSDFAWLSRKSADKITPWNFDEIVDKESSVEAFINRMTNYDLYLPNQKVLPKHSLLYEKFTVYNELTKVKYKTEQGKTAFFDANMKQEIFDGVFKVYRKVTKDKLMDFLEKEFDEFRIVDLTGLDKENKAFNASYGTYHDLRKILDKDFLDNSKNEKILEDIVLTLTLFEDREMIRKRLKNYSDLLTKEQLKKLERRHYTGWGRLSAELIHGIRNKESRKTILDYLIDDGNSNRNFMQLINDDALSFKEEIAKAQVIGETDNLNQVVSDIAGSPAIKKGILQSLKIVDELVKIMGHQPENIVVEMARENQFTNQGRRNSQQRLKGLTDSIKEFGSQILKEHPVENSQLQNDRLFLYYLQNGRDMYTGEELDIDYLSQYDIDHIIPQAFIKDNSIDNRVLTSSKENRGKSDDVPSKDVVRKMKSYWSKLLSAKLITQRKFDNLTKAERGGLTDDDKAGFIKRQLVETRQITKHVARILDERFNTETDENNKKIRQVKIVTLKSNLVSNFRKEFELYKVREINDYHHAHDAYLNAVIGKALLGVYPQLEPEFVYGDYPHFHGHKENKATAKKFFYSNIMNFFKKDDVRTDKNGEIIWKKDEHISNIKKVLSYPQVNIVKKVEEQTGGFSKESILPKGNSYKLIPRKTKKFYWDTKKYGGFDSPIVAYSILVIADIEKGKSKKLKTVKALVGVTIMEKMTFERDPVAFLERKGYRNVQEENIIKLPKYSLFKLENGRKRLLASARELQKGNEIVLPNHLGTLLYHAKNIHKVDEPKHLDYVDKHKDEFKELLDVVSNFSKKYTLAEGNLEKIKELYAQNNGEDLKELASSFINLLTFTAIGAPAAFKFFDKNIDRKRYTSTTEILNATLIHQSITGLYETRIDLSKLGGD

SEQ ID NO: 604 - protein, 1359 aa, Streptococcus mutans 66-2A
MKKPYSIGLDIGTNSVGWAVVTDDYKVPAKKMKVLGNTDKSHIKKNLLGALLFDSGNTAEDRRLKRTARRRYTRRRNRILYLQEIFAEEMMQVDESFFQRLDDSFLVEEDKRGSRYPIFGTLKEEKKYHKEFKTIYHLREKLANSTEKADLRLVYLSLAHMIKFRGHFLIEGQLKAENTNVQALFKDFVEVYDKTVEESHLSEMTVDALSILTEKVSKSRRLENLVECYPTEKKNTLFGNLIALSLGLQPNFKTNFQLSEDAKLQFSKDTYEEDLEGLLGEIGDEYADLFASAKNLYDAILLSGILAVDDNTTKAPLSASMVKRYKEHKEELAAFKRFIKEKLPKKYEEIFKDDTKNGYAGYVGADKKLRKRSGKLATEEEFYKYVKGILNKVEGADVWLDKIDREDFLRKQRTFDNGSIPHQIHLQEMHAILRRQGEHYPFLKENQDKIEKILTFRIPYYVGPLVRKGSRFAWAEYKADEKITPWNFDDILDKEKSAEKFITRMTLNDLYLPEEKVLPKHSLLYETFTVYNELTKVKYVNEQGEAKFFDANMKQEIFDHVFKENRKVTKDKLLNYLNKEFEEFRIVNLTGLDKENKVFNSSLGTYHDLRKILNKSFLDNKENEQIIEDIIQTLTLFEDREMIRQRLQKYSDIFTKAQLKKLERRHYTGWGRLSYKLINGIRDKQSNKTILGYLIDDGYSNRNFMQLINDDALSFKEEIAKAQVIGEMDGLNQVVSDIAGSPAIKKGILQSLKIVDELVKVMGHNPANIVIEMARENQTTAKGRRSSQKRYKRLEEAIKNLDHDLNHKILKEHPTDNQALQNDRLFLYYLQNGRDMYTEDPLDINRLSDYDIDHIIPQAFIKDNSIDNRVLTRSDKNRGKSDDVPSEEVVHKMKPFWSKLLSAKLITQRKFDNLTKAERGGLTDDDKAGFIKRQLVETRQITKHVARILDERFNTETDENNKKIRQVKIVTLKSNLVSNFRKEFELYKVREINDYHHAHDAYLNAVIGKALLGVYPQLEPEFVYGDYPHFHGHKENKATAKKFFYSNIMNFFKKGDVRTDKNGEIIWKKDEHISNIKKVLSYPQVNIVKKVEEQTGGFSKESILPKGNSDKLIPRKTKKFYWDTKKYGGFDSPIVAYSILVIADIEKGKSKKLKTVKALVGVTIMEKMTFERDPVAFLERKGYRNVQEENIIKLPKYSLFKLENGRKRLLASARELQKGNEIVLPNHLETLLYHAKNIHKVDEPKHLDYVDKHKDEFKELLDVVSNFSKKYTLAEGNLEKIKELYAQNNGEDLKELASSFINLLTFTAIGAPAAFKFFDKNIDRKRYTSTTEILNATLIHQSITGLYETRIDLNKLGGD

SEQ ID NO: 605 - protein, 1345 aa, Streptococcus mutans NLML9
MKKPYSIGLDIGTNSVGWAVVTDDYKVSAKKMKVLGNTDKSHIKKNLLGALLFDSGNTAEDRRLKRTARRRYTRRRNRILYLQEIFAEEMSKVDDSFFHRLEDSFLVTEDKRGERHPIFGNLEEEVKYHENFPTIYHLRQYLADNPEKVDLRLVYLALAHIIKFRGHFLIEGKFDTRNNDVQRLFQEFLAVYDNTFENSSLQEQNVQVEEILTDKISKSAKKDRVLKLFPNEKSNGRFAEFLKLIVGNQADFKKHFELEEKAPLQFSKDTYEEELEVLLAQIGDNYAELFLSAKKLYDSILLSGILTVTDVSTKAPLSASMIQRYNEHQMDLAQLKQFIRQKLSDKYNEVFSDVSKDGYAGYIDGKTNQEAFYKYLKGLLNKIEGSGYFLDKIEREDFLRKQRTFDNGSIPHQIHLQEMRAIIRRQAEFYPFLADNQDRIEKILTFRIPYYVGPLARGKSDFAWLSRKSADKITPWNFDEIVDKESSAEAFINRMTNYDLYLPNQKVLPKHSLLYEKFTVYNELTKVKYKTEQGKTAFFDANMKQEIFDGVFKVYRKVTKDKLMDFLEKEFDEFRIVDLTGLDKENKAFNASYGTYHDLRKILDKDFLDNSKNEKILEDIVLTLTLFEDREMIRKRLENYSDLLTKEQVKKLERRHYTGWGRLSAELIHGIRNKESRKTILDYLIDDGNSNRNFMQLINDDALSFKEEIAKAQVIGETDNLNQVVSDIAGSPAIKKGILQSLKIVDELVKIMGHQPENIVVEMARENQFTNQGRRNSQQRLKGLTDSIKEFGSQILKEHPVEHSQLQNDRLFLYYLQNGRDMYTGEELDIDYLSQYDIDHIIPQAFIKDNSIDNRVLTSSKENRGKSDDVPSKNVVRKMKSYWSKLLSAKLITQRKFDNLTKAERGGLTDDDKAGFIKRQLVETRQITKHVARILDERFHTETDENNKKIRQVKIVTLKSNLVSNFRKEFELYKVREINDYHHTHDAYLNAVIGKALLGVYPQLEPEFVYGDYPHFHGHKENKATAKKFFYSNIMNFFKKDDVRTDKNGEIIWKKDEHISNIKKVLSYPQVNIVKKVEEQTGGFSKESILPKGNSDKLIPRKTKKFYWDTKKYGGFDSPIVAYSILVIADIEKGKSKKLKTVKALVGVTIMEKMTFERDPVAFLERKGYRNVQEENIIKLPKYSLFKLENGRKRLLASARELQKGNEIVLPNHLGTLLYHAKNIHKVDEPKHLDYVDKHKDEFKELLDVVSNFSKKYTLAEGNLEKIKELYAQNNGEDLKELASSFINLLTFTAIGAPATFKFFDKNIDRKRYTSTTEILNATLIHQSITGLYETRIDLSKLGGD

SEQ ID NO: 606 - protein, 1345 aa, Streptococcus mutans 4VF1
MKKPYSIGLDIGTNSVGWAVVTDDYKVPAKKMKVLGNTDKSHIKKNLLGALLFDSGNTAEDRRLKRTARRRYTRRRNRILYLQEIFSEEMGKVDDSFFHRLEDSFLVTEDKRGERHPIFGNLEEEVKYHENFPTIYHLRQYLADNPEKVDLRLVYLALAHIIKFRGHFLIEGKFDTRNNDVQRLFQEFLAVYDNTFENSSLQEQNVQVEEILTDKISKSAKKDRVLKLFPNEKSNGRFAEFLKLIVGNQADFKKHFELEEKAPLQFSKDTYEEELEVLLAQIGDNYAELFLSAKKLYDSILLSGILTVTDVSTKAPLSASMIQRYNEHQMDLAQLKQFIRQKLSDKYNEVFSDVSKDGYAGYIDGKTNQEAFYKYLKGLLNKIEGSGYFLDKIEREDFLRKQRTFDNGSIPHQIHLQEMRAIIRRQAEFYPFLADNQDRIEKILTFRIPYYVGPLARGKSDFAWLSRKSADKITPWNFDEIVDKESSAEAFINRMTNYDLYLPNQKVLPKHSLLYEKFTVYNELTKVKYKTEQGKTAFFDANMKQEIFDGVFKVYRKVTKDKLMDFLEKEFDEFRIVDLTGLDKENKVFNASYGTYHDLCKILDKDFLDNSKNEKILEDIVLTLTLFEDREMIRKRLENYSDLLTKEQVKKLERRHYTGWGRLSAELIHGIRNKESRKTILDYLIDDGNSNRNFMQLINDDALSFKEEIAKAQVIGETDNLNQVVSDIAGSPAIKKGILQSLKIVDELVKIMGHQPENIVVEMARENQFTKQGRRNSQQRLKGLTDSIKEFGSQILKEHPVENSQLQNDRLFLYYLQNGRDMYTGEELDIDYLSQYDIDHIIPQAFIKDNSIDNRVLTSSKENRGKSDDVPSKDVVRKMKSYWSKLLSAKLITQRKFDNLTKAERGGLTDDDKAGFIKRQLVETRQITKHVARILDERFYTETDENNKKIRQVKIVTLKSNLVSNFRKEFELYKVREINDYHHAHDAYLNAVIGKALLGVYPQLEPEFVYGDYPHFHGHKENKATAKKFFYSNIMNFFKKDDVRTDRNGEIIWKKDEHISNIKKVLSYPQVNIVKKVEEQTGGFSKESILPKGNSDKLIPRKTKKFYWDTKKYGGFDSPIVAYSILVIADIEKGKSKKLKTVKALVGVTIMEKMTFERDPVAFLERKGYRNVQEENIIKLPKYSLFKLENGRKRLLASARELQKGNEIVLPNHLGTLLYHAKNIHKVDEPKHLDYVDKHKDEFKELLDVVSNFSKKYTLAEGNLEKIKELYAQNNGEDLKELASSFINLLTFTAIGAPATFKFFDKNIDRKRYTSTTEILNATLIHQSITGLYETRIDLSKLGGD

SEQ ID NO: 607 - protein, 1345 aa, Streptococcus mutans N66
MKKPYSIGLDIGTNSVGWAVVTDDYKVPAKKMKVLGNTDKSHIKKNLLGALLFDSGNTAEDRRLKRTARRRYTRRRNRILYLQEIFSEEMGKVDDSFFHRLEDSFLVTEDKRGERHPIFGNLEEEVKYHENFPTIYHLRQYLADNPEKTDLRLVYLALAHIIKFRGHFLIEGKFDTRNNDVQRLFQEFLAVYDNTFENSSLQEQNVQVEEILTDKISKSAKKDRVLKLFPNEKSNGRFAEFLKLIVGNQADFKKHFELEEKAPLQFSKDIYEEELEVLLAQIGDNYAELFLSAKKLYDSILLSGILTVTDVSTKAPLSASMIQRYNEHQMDLAQLKQFIRQKLSDKYNEVFSDVSKDGYAGYIDGKTNQEAFYKYLKGLLNKIEGSGYFLDKIEREDFLRKQRTFDNGSIPHQIHLQEMRAIIRRQAEFYPFLADNQDRIEKILTFRIPYYVGPLARGKSDFAWLSRKSADKITPWNFDEIVDKESSAEAFINRMTNYDLYLPNQKVLPKHSLLYEKFTVYNELTKVKYKTEQGKTAFFDANMKQEIFDGVFKVYRKVTKDKLMDFLEKEFDEFRIVDLTGLDKENKAFNASYGTYHDLRKILDKDFLDNSKNEKILEDIVLTLTLFEDREMIRKRLKNYSDLLTKEQLKKLERRHYTGWGRLSAELIHGIRNKESRKTILDYLIDDGNSNRNFMQLINDDALSFKEEIAKAQVIGETDNLNQVVSDIAGSLAIKKGILQSLKIVDELVKIMGHQPENIVVEMARENQFTNQGRRNSQQRLKGLTDSIKEFGSQILKEHPVENSQLQNDRLFLYYLQNGRDMYTGEELDIDYLSQYDIDHIIPQAFIKDNSIDNRVLTSSKENRGKSDDVPSKDVVRKMKSYWSKLLSAKLITQRKFDNLTKGERGGLTDDDKAGFIKRQLVETRQITKHVARILDERFNTETDENNKKIRQVKIVTLKSNLVSNFRKEFELYKVREINDYHHAHDAYLNAVIGKALLGVYPQLEPEFVYGDYPHFHGHKENKATAKKFFYSNIMNFFKKDDVRTDKNGEIIWKKDEYISNIKKVLSYPQVNIVKKVEEQTGGFFKESILPKGDSDKLIPRKTKKFYWDTKKYGGFDSPIVAYSILVIADIEKGKSKKLKTVKALVGVTIMEKMTFERDPVAFLERKGYRNVQEENIIKLPKYSLFKLENGRKRLLASARELQKGNEIVLPNHLGTLLYHAKNIHKVDEPKHLDYVDKHKDEFKELLDVVSNFSKKYTLAEGNLEKIKELYAQNNGEDLKELASSFINLLTFTAIGAPATFKFFDKNIDRKRYTSTTEILNATLIHQSITGLYETRIDLSKLGGD

SEQ ID NO: 608 - protein, 1374 aa, Streptococcus pseudoporcinus LQ 940-04
MKKRYSYSIGLDIGTNSVGWAVINEDYKVPAKKMTVFGNTDRKTIKKNLLGTVLFDSGETAQARRLKRTNRRRYTRRRYRLCQLQNIFATEMVKVDDTFFQRLSESFFYYQDKAFDKHPIFGNSKEERAYHKTYPTIYHLRKDLADRDQKADLRLIYLALSHIIKFRGHFLIEGKLNSENTDVQKLFIALVTVYNLLFEEEPIAGETCDAKALLTAKTSKSKRLESLISEFPGQKKNGLFGNLLALALGLRPNFKSNFGLSEDAKLQITKDTYEEELDNLLAEIGDHYADLFLAAKNLSDAILLSDILTLSDENTRAPLSASMIKRYEEHQEDLALLKKLVKEQMPEKYWEIFSNAKKNGYAGYIEGKVSQEDFYRYIKPILSRLKGGDEFLAKIDRDDFLRKQRTFDNGSIPHQIHLKELHAILRRQEKYYPFLAEQKEKIEQLLCFRIPYYVGPLAKGGNSSFAWLKRRSDEPITPWNFKDVVDEEASAQAFIEGMTNYDTYLPEEKVLPKHSPLYEMFTVYNELTKVKYIAENMTKPLYLSAEQKEAIIDHLFKQTRKVTVKDLKEKYFSQIEGLENVDVTGVEGAFNASLGTYNDLLKIIKDKAFLDDEANAEILEEIVLILTLFQDEKLIEKRLAKYANLFEKSVLKKLRKRHYRGWGRLSRQLIDGMKDKASGKTILDFLKADDFANRNFIQLINDSSLDFEKLIDDAQKKAIKRESLTEAVANLAGSPAIKKGILQSLKVVDEIVKVMGHNPDNIVIEMSRENQTTAQGLKNARQRLKKIKEVHKKTGSRILEDNSERITNLTLQDNRLYLYLLQDGKDMYTGQDLDINNLSQYDIDHIIPQSFIKDNSIDNLVLTTQKANRGKSDNVPSIEVVRDMKDRVWRRQLANGAISRQKFDHLTKAERGGLADSDKARFLRRQLVETRQITKHVAQLLDSRFNSKSNQNKKLARNVKIITLKSKIVSDFRKDFGLYKLREVNNYHHAHDAYLNAVVGTALLKKYPKLEAEFVYGDYKHFDLVKLISKSDPSLGKATAKVFFYSNIMNFFKEELSLADGTLMKRPVIETNTETGEVVWDKVKDFKTIRKVLSYPQVNIVKKTEIQSGAFSKESVLSKGNSDKLIERKKGWDPKKYGGFDSPNTAYSIFVVAKVAKRKAQKLKTVKEIVGITIMEQAEYEKDNIAFLEKKGYQDIQEKLLIKLPKYSLFELENGRRRLLASANEFQKGNELALSGKYMKFLYLASRYDKLSSKIESEQQKKLFVEQHLHYFDEILDIVVKHATCYIKAENNLKKIISLYKKKEAYSINEQALNMLNLFIFTSLGAPSTFVFFDETIDRKRYTTSSDVLNGILIQQSITGLYETRIDLSRFGGD

SEQ ID NO: 609 - protein, 1345 aa, Streptococcus mutans 11VS1
MKKPYSIGLDIGTNSVGWAVVTDDYKVPAKKMKVLGNTDKSHIKKNLLGALLFDSGNTAEDRRLKRTARRRYTRRRNRILYLQEIFSEEMGKVDDSFFHRLEDSFLVTEDKRGERHPIFGNLEEEVKYHENFPTIYHLRQYLADNPEKVDLRLVYLALAHIIKFRGHFLIEGKFDTRNNDVQRLFQEFLAVYDNTFENSSLQEQNVQVEEILTDKISKSAKKDRVLKLFPNEKSNGRFAEFLKLIVGNQADFKKHFELEEKAPLQFSKDTYEEELEVLLAQIGDNYAELFLSAKKLYDSILLSGILTVTDVSTKAPLSASMIQRYNEHQMDLAQLKQFIRQKLSDKYNEVFSDVSKDGYAGYIDGKTNQEAFYKYLKGLLNKIEGSGYFLDKIEREDFLRKQRTFDNGSIPHQIHLQEMRAIIRRQAEFYPFLADNQDRIEKILTFRIPYYVGPLARGKSDFAWLSRKSADKITPWNFDEIVDKESSAEAFINRMTNYDLYLPNQKVLPKHSLLYEKFTVYNELTKVKYKTEQGKTAFFDANMKQEIFDGVFKVYRKVTKDKLMDFLEKEFDEFRIVDLTGLDKENKVFNASYGTYHDLCKILDKDFLDNSKNEKILEDIVLTLTLFEDREMIRKRLENYSDLLTKEQVKKLERRHYTGWGRLSAELIHGIRNKESRKTILDYLIDDGNSNRNFMQLINDDALSFKEEIAKAQVIGETDNLNQVVSDIAGSPAIKKGILQSLKIVDELVKIMGHQPENIVVEMARENQFTKQGRRNSQQRLKGLTDSIKEFGSQILKEHPVENSQLQNDRLFLYYLQNGRDMYTGEELDIDYLSQYDIDHIIPQAFIKDNSIDNRVLTSSKENRGKSDDVPSKDVVRKMKSYWSKLLSAKLITQRKFDNLTKAERGGLTDDDKAGFIKRQLVETRQITKHVARILDERFYTETDENNKKIRQVKIVTLKSNLVSNFRKEFELYKVREINDYHHAHDAYLNAVIGKALLGVYPQLEPEFVYGDYPHFHGHKENKATAKKFFYSNIMNFFKKDDVRTDKNGEIIWKKDEHISNIKKVLSYPQVNIVKKVEEQTGGFSKESILPKGNSDKLIPRKTKKFYWDTKKYGGFDSPIVAYSILVIADIEKGKSKKLKTVKALVGVTIMEKMTFERDPVAFLERKGYRNVQEENIIKLPKYSLFKLENGRKRLLASARELQKGNEIVLPNHLGTLLYHAKNIHKVDEPKHLDYVDKHKDEFKELLDVVSNFSKKYTLAEGNLEKIKELYAQNNGEDLKELASSFINLLTFTAIGAPATFKFFDKNIDRKRYTSTTEILNATLIHQSITGLYETRIDLSKLGGD

SEQ ID NO: 610 - protein, 1229 aa, Streptococcus mutans SA38
MKKPYSIGLDIGTNSVGWAVVTDDYKVPAKKMKVLGNTDKSHIEKNLLGALLFDSGNTAEDRRLKRTARRRYTRRRNRILYLQEIFSEEMGKVDDSFFHRLEDSFLVTEDKRGERHPIFGNLEEEVKYHENFPTIYHLRQYLADNPEKVDLRLVYLALAHIIKFRGHFLIEGKFDTRNNDVQRLFQEFLAVYDNTFENSSLQEQNIQVEEILTDKISKSAKKDRVLKLFPNEKSNGRFAEFLKLIVGNQADFKKHFELEEKAPLQFSKDTYEEELEVLLAQIGDNYAELFLSAKKLYDSILLSGILTVTDVGTKAPLSASMIQRYNEHQMDLTQLKQFIRQKLSDKYNEVFSDVSKDGYAGYIDGKTNQEAFYKYLKGLLNKIEGSGYFLDKIEREDFLRKQRTFDNGSIPHQIHLQEMRAIIRRQAEFYPFLADNQDRIEKILTFRIPYYVGPLARGKSDFAWLSRKSADKITPWNFDEIVDKESSAEAFINRMTNYDLYLPNQKVLPKHSLLYEKFTVYNELTKVKYKTEQGKTAFFDANMKQEIFDGVFKVYRKVTKDKLMDFLEKEFDEFRIVDLTGLDKENKVFNASYGTYHDLCKILDKDFLDNSKNEKILEDIVLTLTLFEDREMIRKRLENYSDLLTKEQVKKLERRHYTGWGRLSAELIHGIRNKESRKTILDYLIDDGNSNRNFMQLINDDALSFKEEIAKAQVIGETDNLNQVVSDIAGSPAIKKGILQSLKIVDELVKIMGHQPENIVVEMARENQFTNQGRRNSQQRLKGLTDSIKEFGSQILKEHPVENSQLQNDRLFLYYLQNGRDMYTGEELDIDYLSQYDIDHIIPQAFIKDNSIDNRVLTSSKENRGKSDDVPSKDVVRKMKPYWSKLLSAKLITQRKFDNLTKAERGGLTDDDKAGFIKRQLVETRQITKHVARILDERFNTETDENNKKIRQVKIVTLKSNLVSNFRKEFELYKVREINDYHHAHDAYLNAVIGKALLGVYPQLEPEFVYGDYPHFHGHEENKATAKKFFYSNIMNFFKKDDVRTDKNGEIIWKKDEHISNIKKVLSYPQVNIVKKVEEQTIGQNGGLFDDNPKSPLEVIPSKLVPLKKALNPEKYGGYQKPTTAYPILLIVDTKQLIPISVMDKKRFEQNPVKFLKDKGYQQIEKNNFVKLPKYTLVDIGNGIKRLWASSKEVHKGNQLVVSKKSQDLLYHAHHLDNDYSNEYVKNHY

SEQ ID NO: 611 - protein, 1368 aa, Streptococcus pyogenes A20; identical to SEQ ID NO: 601

SEQ ID NO: 612 - protein, 1345 aa, Streptococcus mutans A9
MKKPYSIGLDIGTNSVGWAVVTDDYKVPAKKMKVLGNTDKSHIKKNLLGALLFDSGNTAEDRRLKRTARRRYTRRRNRILYLQEIFSEEMGKVDDSFFHRLDESFLTDDDKNFDSHPIFGNKAEEDAYHQKFPTIYHLRKHLADSTEKADLRLVYLALAHMIKFRGHFLIEGELNAENTDVQKLFADFVGVYDRTFDDSHLSEITVDASSILTEKISKSRRLEKLINNYPKEKKNTLFGNLIALSLGLQPNFKTNFKLSEDAKLQFSKDTYEEELEVLLAQIGDNYAELFLSAKKLYDSILLSGILTVTDVSTKAPLSASMIQRYNEHQMDLAQLKQFIRQKLSDKYNEVFSDVSKDGYAGYIDGKTNQEAFYKYLKGLLNKIEGSGYFLDKIEREDFLRKQRTFDNGSIPHQIHLQEMRAIIRRQAEFYPFLADNQDRIEKILTFRIPYYVGPLARGKSDFAWLSRKSADKITPWNFDEIVDKESSVEAFINRMTNYDLYLPNQKVLPKHSLLYEKFTVYNELTKVKYKTEQGKTAFFDANMKQEIFDGVFKVYRKVTKDKLMDFLEKEFDEFRIVDLTGLDKENKAFNASYGTYHDLRKILDKDFLDNSKNEKILEDIVLTLTLFEDREMIRKRLKNYSDLLTKEQLKKLERRHYTGWGRLSAELIHGIRNKESRKTILDYLIDDGNSNRNFMQLINDDALSFKEEIAKAQVIGETDNLNQVVSDIAGSPAIKKGILQSLKIVDELVKIMGHQPENIVVEMARENQFTNQGRRNSQQRLKGLTDSIKEFGSQILKEHPVENSQLQNDRLFLYYLQNGRDMYTGEELDIDYLSQYDIDHIIPQAFIKDNSIDNRVLTSSKENRGKSDDVPSKDVVRKMKSYWSKLLSAKLITQRKFDNLTKGERGGLTDDDKAGFIKRQLVETRQITKHVARILDERFNTETDENNKKIRQVKIVTLKSNLVSNFRKEFELYKVREINDYHHAHDAYLNAVIGKALLGVYPQLEPEFVYGDYPHFHGHKENKATAKKFFYSNIMNFFKKDDVRTDKNGEIIWKKDEYISNIKKVLSYPQVNIVKKVEEQTGGFSKESILPKGDSDKLIPRKTKKFYWDTKKYGGFDSPIVAYSILVIADIEKGKSKKLKTVKALVGVTIMEKMTFERDPVAFLERKGYRNVQEENIIKLPKYSLFKLENGRKRLLASARELQKGNEIVLPNHLGTLLYHAKNIHKVDEPKHLDYVDKHKDEFKELLDVVSNFSKKYTLAEGNLEKIKELYAQNNGEDLKELASSFINLLTFTAIGAPATFKFFDKNIDRKRYTSTTEILNATLIHQSITGLYETRIDLSKLGGD

SEQ ID NO: 613 - protein, 1345 aa, Streptococcus mutans SM4
MKKPYSIGLDIGTNSVGWAVVTDDYKVPAKKMKVLGNTDKSHIKKNLLGALLFDSGNTAEDRRLKRTARRRYTRRRNRILYLQEIFSEEMDKVDDSFFHRLEDSFLVTEDKRGERHPIFGNLEEEVKYHENFPTIYHLRQYLADNPEKVDLRLVYLALAHIIKFRGHFLIEGKFDTRNNDVQRLFQEFLAVYDNTFENSSLQEQNVQVEEILTDKISKSAKKDRVLKLFPNEKSNGRFAEFLKLIVGNQADFKKHFELEEKAPLQFSKDTYEEELEVLLAQIGDNYAELFLSAKKLYDSILLSGILTVTDVSTKAPLSASMIQRYNEHQMDLAQLKQFIRQKLSDKYNEVFSDVSKDGYAGYIDGKTNQEAFYKYLKGLLNKIEGSGYFLDKIEREDFLRKQRTFDNGSIPHQIHLQEMRAIIRRQAEFYPFLADNQDRIEKILTFRIPYYVGPLARGKSDFAWLSRKSADKITPWNFDEIVDKESSAEAFINRMTNYDLYLPNQKVLPKHSLLYEKFTVYNELTKVKYKTEQGKTAFFDANMKQEIFDGVFKVYRKVTKDKLMDFLEKEFDEFRIVDLTGLDKENKVFNASYGTYHDLCKILDKDFLDNSKNEKILEDIVLTLTLFEDREMIRKRLENYSDLLTKEQVKKLERRHYTGWGRLSAELIHGIRNKESRKTILDYLIDDGNSNRNFMQLINDDALSFKEEIAKAQVIGETDNLNQVVSDIAGSPAIKKGILQSLKIVDELVKIMGHQPENIVVEMARENQFTKQGRRNSQQRLKGLTDSIKEFGSQILKEHPVENSQLQNDRLFLYYLQNGRDMYTGEELDIDYLSQYDIDHIIPQAFIKDNSIDNRVLTSSKENRGKSDDVPSKDVVRKMKSYWSKLLSAKLITQRKFDNLTKAERGGLTDDDKAGFIKRQLVETRQITKHVARILDERFYTETDENNKKIRQVKIVTLKSNLVSNFRKEFELYKVREINDYHHAHDAYLNAVIGKALLGVYPQLEPEFVYGDYPHFHGHKENKATAKKFFYSNIMNFFKKDDVRTDKNGEIIWKKDEHISNIKKVLSYPQVNIVKKVEEQTGGFSKESILPKGNSDKLIPRKTKKFYWDTKKYGGFDSPIVAYSILVIADIEKGKSKKLKTVKALVGVTIMEKMTFERDPVAFLERKGYRNVQEENIIKLPKYSLFKLENGRKRLLASARELQKGNEIVLPNHLGTLLYHAKNIHKVDEPKHLDYVDKHKDEFKELLDVVSNFSKKYTLAEGNLEKIKELYAQNNGEDLKELASSFINLLTFTAIGAPATFKFFDKNIDRKRYTSTTEILNATLIHQSITGLYETRIDLSKLGGD

SEQ ID NO: 614 - protein, 1345 aa, Streptococcus mutans KK21; identical to SEQ ID NO: 602

SEQ ID NO: 615 - protein, 1345 aa, Streptococcus mutans M21
MKKPYSIGLDIGTNSVGWAVVTDDYKVPAKKMKVLGNTDKSHIKKNLLGALLFDSGNTAEDRRLKRTARRRYTRRRNRILYLQEIFSEEMGKVDDSFFHRLEDSFLVTEDKRGERHPIFGNLEEEVKYHENFPTIYHLRQYLADNPEKTDLRLVYLALAHIIKFRGHFLIEGKFDTRNNDVQRLFQEFLAVYDNTFENSSLQEQNVQVEEILTDKISKSAKKDRVLKLFPNEKSNGRFAEFLKLIVGNQADFKKHFELEEKAPLQFSKDIYEEELEVLLAQIGDNYAELFLSAKKLYDSILLSGILTVTDVSTKAPLSASMIQRYNEHQMDLAQLKQFIRQKLSDKYNEVFSDVSKDGYAGYIDGKTNQEAFYKYLKGLLNKIEGSGYFLDKIEREDFLRKQRTFDNGSIPHQIHLQEMRAIIRRQAEFYPFLADNQDRIEKILTFRIPYYVGPLARGKSDFAWLSRKSADKITPWNFDEIVDKESSVEAFINRMTNYDLYLPNQKVLPKHSLLYEKFTVYNELTKVKYKTEQGKTAFFDANMKQEIFDGVFKVYRKVTKDKLMDFLEKEFDEFRIVDLTGLDKENKAFNASYGTYHDLRKILDKDFLDNSKNEKILEDIVLTLTLFEDREMIRKRLKNYSDLLTKEQLKKLERRHYTGWGRLSAELIHGIRNKESRKTILDYLIDDGNSNRNFMQLINDDALSFKEEIAKAQVIGETDNLNQVVSDIAGSPAIKKGILQSLKIVDELVKIMGHQPENIVVEMARENQFTNQGRRNSQQRLKGLTDSIKEFGSQILKEHPVENSQLQNDRLFLYYLQNGRDMYTGEELDIDYLSQYDIDHIIPQAFIKDNSIDNRVLTSSKENRGKSDDVPSKNVVRKMKSYWSKLLSAKLITQRKFDNLTKAERGGLTDDDKAGFIKRQLVETRQITKHVARILDERFHTETDENNKKIRQVKIVTLKSNLVSNFRKEFELYKVREINDYHHAHDAYLNAVIGKALLGVYPQLEPEFVYGDYPHFHGHKENKATAKKFFYSNIMNFFKKDDVRTDKNGEIIWKKDEHISNIKKVLSYPQVNIVKKVEEQTGGFSKESILPKGNSDKLIPRKTKKFYWDTKKYGGFDSPIVAYSILVIADIEKGKSKKLKTVKALVGVTIMEKMTFERDPVAFLERKGYRNVQEENIIKLPKYSLFKLENGRKRLLASARELQKGNEIVLPNHLGTLLYHAKNIHKVDEPKHLDYVDKHKDEFKELLDVVSNFSKKYTLAEGNLEKIKELYAQNNGEDLKELASSFINLLTFTAIGAPATFKFFDKNIDRKRYTSTTEILNATLIHQSITGLYETRIDLSKLGGD

SEQ ID NO: 616 - protein, 611 aa, Streptococcus dysgalactiae subsp. equisimilis SK1249
KSRRLENLIAQLPGEKKNGLFGNLIALSLGLTPNFKSNFDLAEDAKLQLSKDTYDDDLDNLLAQIGDQYADLFLAAKNLSDATLLSDILRVNSEITKAPLSASMIKRYDEHHQDLTLLKALVRQQLPEKYKEIFFDQSKNGYAGYIDGGASQEEFYKFIKPILEKMDGTEELLAKLNREDLLRKQRTFDNGSIPHQIHLGELHAILRRQEDFYPFLKDNREKIEKILTFRIPYYVGPLARGNSRFAWMTRKSEETITPWNFEEVVDKGASAQSFIERMTNFDKNLPNEKVLPKHSLLYEYFTVYNELTKVKYVTEGMRKPAFLSGEQKKAIVDLLFKTNRKVTVKQLKEDYFKKIECFDSVEISGVEDRFNASLGTYHDLLKIIKDKDFLDNEENEDILEDIVLTLTLFEDKEMIEERLKTYAHLFDDKVMKQLKRRHYTGWGRLSRKLINGIRDKQSGKTILDFLKSDGFANRNFIQLIHDDSLTFKEAIQKAQVSGQGHSLHEQIANLAGSPAIKKGILQSVKVVDELVKVMGHKPENIVIEMARENQTTQKGQKNSRERMKRIEEGIKELGSQILKEHPVENTQLQNEKLYLYYLQNGRDMYVDQELD

SEQ ID NO: 617 - protein, 213 aa, Streptococcus dysgalactiae subsp. equisimilis SK1249
MDKKYSIGLDIGTNSVGWAVITDDYKVPSKKFKVLGNTDRHSIKKNLIGALLFDSGETAEATRLKRTARRRYTRRKNRIRYLQEIFSSEMSKVDDSFFHRLEESFLVEEDKKHERHPIFGNIVDEVAYHEKYPTIYHLRKKLADSTDKADLRLIYLALAHMIKFRGHFLIEGDLNPDNSDVDKLFIQLVQTYNQLFEEKPINASGVDAKAILS

SEQ ID NO: 618 - protein, 1345 aa, Streptococcus mutans U138; identical to SEQ ID NO: 578

SEQ ID NO: 619 - protein, 1345 aa, Streptococcus mutans SM1
MKKPYSIGLDIGTNSVGWAVVTDDYKVPAKKMKVLGNTDKSHIKKNLLGALLFDSGNTAEDRRLKRTARRRYTRRRNRILYLQEIFSEEMGKVDDSFFHRLEDSFLVTEDKRGERHPIFGNLEEEVKYHENFPTIYHLRQYLADNPEKVDLRLVYLALAHIIKFRGHFLIEGKFDTRNNDVQKLFQEFLAVYDNTFENSSLQEQNVQVEEILTDKISKSAKKDRVLKLFPNEKSNGRFAEFLKLIVGNQADFKKHFELEEKAPLQLSKDTYEEELEVLLAQIGDNYAELFLSAKKLYDSILLSGILTVTDVSTKAPLSASMIQRYNEHQMDLAQLKQFIRQKLSDKYNEVFSDVSKDGYAGYIDGKTNQEAFYKYLKGLLNKIEGSGYFLDKIEREDFLRKQRTFDNGSIPHQIHLQEMRAIIRRQAEFYPFLADNQDRIEKILTFRIPYYVGPLARGKSDFAWLSRKSADKITPWNFDEIVDKESSVEAFINRMTNYDLYLPNQKVLPKHSLLYEKFTVYNELTKVKYKTEQGKTAFFDANMKQEIFDGVFKVYRKVTKDKLMDFLEKEFDEFRIVDLTGLDKENKAFNASYGTYHDLRKILDKDFLDNSKNEKILEDIVLTLTLFEDREMIRKRLENYSDLLTKEQVKKLERRHYTGWGRLSAELIHGIRNKESRKTLLDYLIDDGNSNRNFMQLINDDALSFKEEIAKAQVIGETDNLNQVVSDIAGSPAIKKGILQSLKIVDELVKIMGHQPENIVVEMARENQFTNQGRRNSQQRLKGLTDSIKEFGSQILKEHPVENSQLQNDRLFLYYLQNGRDMYTGEELDIDYLSQYDIDHIIPQAFIKDNSIDNRVLTSSKENRGKSDDVPSKDVVRKMKSYWSKLLSAKLITQRKFDNLTKAERGGLTDDDKAGFIKRQLVETRQITKHVARILDERFNTETDENNKKIRQVKIVTLKSNLVSNFRKEFELYKVREINDYHHAHDAYLNAVIGKALLGVYPQLEPEFVYGDYPHFHGHKENKATAKKFFYSNIMNFFKKDDVRTDKNGEIIWKKDEYISNIKKVLSYPQVNIVKKVEEQTGGFSKESILPKGNSDKLIPRKTKKFYWDTKKYGGFDSPIVAYSILVIADIEKGKSKKLKTVKALVGVTIMEKMTFERDPIAFLERKGYRNVQEENIIKLPKYSLFKLENGRKRLLASARELQKGNEIVLPNHLGTLLYHAKNIHKVDEPKHLDYVDKHKDEFKELLDVVSNFSKKYTLAEGNLEKIKELYAQNNGEDLKELASSFINLLTFTAIGAPATFKFFDKNIDRKRYTSTTEILNATLIHQSITGLYETRIDLSKLGGD

SEQ ID NO: 620 - protein, 1350 aa, Streptococcus mutans ST6
MKKPYSIGLDIGTNSVGWAVVTDDYKVPAKKMKVLGNTDKSHIEKNLLGALLFDSGNTAEDRRLKRTARRRYTRRRNRILYLQEIFSEEMGKVDDSFFHRLEDSFLVTEDKRGERHPIFGNLEEEVKYHENFPTIYHLRQYLADNPEKVDLRLVYLALAHIIKFRGHFLIEGKFDTRNNDVQRLFQEFLAVYDNTFENSSLQEQNVQVEEILTDKISKSAKKDRVLKLFPNEKSNGRFAEFLKLIVGNQADFKKHFELEEKAPLQFSKDTYEEELEVLLAQIGDNYAELFLSAKKLYDSILLSGILTVTDVSTKAPLSASMIQRYNEHQMDLTQLKQFIRQKLSDKYNEVFSDVSKDGYAGYIDGKTNQEAFYKYLKGLLNKIEGSGYFLDKIEREDFLRKQRTFDNGSIPHQIHLQEMRAIIRRQAEFYSFLADNQDRIEKILTFRIPYYVGPLARGKSDFAWLSRKSADKITPWNFDEIVDKESSAEAFINRMTNYDLYLPNQKVLPKHSLLYEKFTVYNELTKVKYKTEQGKTAFFDANMKQEIFDGVFKVYRKVTKDKLMDFLEKEFDEFRIVDLTGLDKENKAFNASYGTYHDLRKILDKDFLDNSKNEKILEDIVLTLTLFEDREMIRKRLENYSDLLTKEQVKKLERRHYTGWGRLSAELIHGIRNKESRKTILDYLIDDGNSNRNFMQLINDDALSFKEEIAKAQVIGETDNLNQVVSDIAGSPAIKKGILQSLKIVDELVKIMGHQPENIVVEMARENQFTNQGRRNSQQRLKGLTDSIKEFGSQILKEHPVENSQLQNDRLFLYYLQNGRDMYTGEELDIDYLSQYDIDHIIPQAFIKDNSIDNRVLTSSKENRGKSDDVPSEDVVNRMRPFWNKLLSSGLISQRKYNNLTKKELTLDDKAGFIKRQLVETRQITKHVARMLDERFNKEFDDNNKRIRKVKIVTLKSNLVSSFRKEFELYKVREINDYHHAHDAYLNAVVVKALLVKYSKLEPEFVYGEYPKYNSYRERKTATQKMFFYSNIMNMFKSKVKLADDQIVERPMIEVNDETGEIAWDKTKHITTVKKVLSYPQVNIVKKVEEQTIGQNGGLFDDNPKSPLEVIPSKLVPLKKALNPEKYGGYQKPTTAYPILLIVDTKQLIPISVMDKKRFEQNPVKFLKDKGYQQIEKNNFVKLPKYTLVDIGNGIKRLWASSKEVHKGNQLVVSKKSQDLLYHAHHLDNDYSNEYVKNHYQQFDILFNEITSFSKKCKLGKEHIQKIEEAYSKERDSASIEELADGFIKLLGFTQLGATSPFSFLGIKLNQKQYTGKKDYLLPCMEATLIHQSITGLYETRIDLSKLGGD

SEQ ID NO: 621 - protein, 1345 aa, Streptococcus mutans 11SSST2
MKKPYSIGLDIGTNSVGWAVVTDDYKVPAKKMKVLGNTDKSHIKKNLLGALLFDSGNTAADRRLKRTARRRYTRRRNRILYLQEIFAEEMSKVDDSFFHRLEDSFLVTEDKRGERHPIFGNLEEEVKYHENFPTIYHLRQYLADNPEKVDLRLVYLALAHIIKFRGHFLIEGKFDTRNNDVQRLFQEFLAVYDNTFENSSLQEQNVQVEEILTDKISKSAKKDRVLKLFPNEKSNGRFAEFLKLIVGNQADFKKHFELEEKAPLQFSKDTYEEELEVLLTQIGDNYAELFLSAKKLYDSILLSGILTVTDVSTKAPLSASMIQRYNEHQMDLAQLKQFIRQKLSDKYNEVFSDVSKDGYAGYIDGKTNQEAFYKYLKGLLNKIEGSGYFLDKIEREDFLRKQRTFDNGSIPHQIHLQEMRAIIRRQAEFYPFLADNQDRIEKILTFRIPYYVGPLARGKSDFAWLSRKSADKITPWNFDEIVDKESSAEAFINRMTNYDLYLPNQKVLPKHSLLYEKFTVYNELTKVKYKTEQGKTAFFDANMKQEIFDGVFKVYRKVTKDKLMDFLEKEFDEFRIVDLTGLDKENKAFNASYGTYHDLRKILDKDFLDNSKNEKILEDIVLTLTLFEDREMIRKRLENYSDLLTKEQVKKLERRHYTGWGRLSAELIHGIRNKESRKTLLDYLIDDGNSNRNFMQLINDDALSFKEEIAKAQVIGETDNLNQVVSDIAGSPAIKKGILQSLKIVDELVKIMGHQPENIVVEMARENQFTNQGRRNSQQRLKGLTDSIKEFGSQILKEHPVENSQLQNDRLFLYYLQNGRDMYTGEELDIDYLSQYDIDHIIPQAFIKDNSIDNRVLTSSKENRGKSDDVPSKDVVRKMKPYWSKLLSAKLITQRKFDNLTKAERGGLTDDDKAGFIKRQLVETRQITKHVARILDERFNTETDENNKKIRQVKIVTLKSNLVSNFRKEFELYKVREINDYHHAHDAYLNAVIGKALLGVYPQLEPEFVYGDYPHFHGHEENKATAKKFFYSNIMNFFKKDDVRTDKNGEIIWKKDEHISNIKKVLSYPQVNIVKKVEEQTGGFSKESILPKGNSDKLIPRKTKKFYWDTKKYGGFDSPIVAYSILVIADIEKGKSKKLKTVKALVGVTIMEKMTFERDPVAFLERKGYRNVQEENIIKLPKYSLFKLENGRKRLLASARELQKGNEIVLPNHLGTLLYHAKNIHKVDEPKHLDYVDKHKDEFKELLDVVSNFSKKYTLAEGNLEKIKELYAQNNGEDLKELSSSFINLLTFTAIGAPAAFKFFDKNIDRKRYTSTTEILNATLIHQSITGLYETRIDLSKLGGD

SEQ ID NO: 622 - protein, 1381 aa, Streptococcus suis ST1
MVKKKYAIGIDIGTNSVGWSIVTDDYKVPSKKMKVFGNTEKRYIKKNLLGTLLFDEGNTAENRRLKRTARRRYTRRRNRILYLQEIFAEEINKIDDSFFQRLDDSFLIVEDKQGSKHPIFGTLQEEKEYHKQFPTIYHLRKQLADSSQKADIRLIYLALAHIIKYRGHFLFEGDLKSENKDVQHLFNDFVEMFDKTVEGSYLSENLPNVADVLVEKVSKSRRLENILHYFPNEKKNGLFGNFLALALGLQPNFKTNFELAEDAKIQFSKETYEEDLEELLGKIGDDYADLFIATKSLYDGILLAGILSTTDSTTKAPLSSSMVNRYEEHQKDLALLKNFIHQNLSDSYKEVFNDKLKDGYAGYIEGKTTQENFYRFIKKAIEKIEGSNYFIDKIDREDFLRKQRTFDNGSIPHQIHLQEMHAIIRRQAEFYPFLVENQDKIEKILTFRIPYYVGPLARGKSEFAWLNRKSDEKIRPWNFDEMVDKETSAENFITRMTNYDRYLPDQKVLPKHSLLYEKFAVYNELTKVKFIAEGMRDYQFLDSGQKKDIVKTLFKTKRKVTAKDIKAYLENSNGYAGVELKGLEEQFNASLPTYHDLLKILRDKAFIDAEENQEILEDIVLTLTLFEDREMIRKRLEKYKDILTEEQRKKLERRHYTGWGRLSAKLINGILDKVTRKTILGYLIDDGTSNRNFMQLINDDTLSFVDEIRLAQGSGEAEDYRAEVQNLAGSPAIKKGILQSLKIVDELIEVMGYEPEHIVVEMARENQFTNQGRRNSQQRINRLENALKDFGSKILEEQKPYGVSKVNNIHLQSDRLFLYYLQNGKDMYTDEELDIDHLSEYDIDHIIPQAFIKDDSLDNKVLTKSAKNRGKSDDVPSMEIVHNRKNFWRQLLKSKLISQRKFDNLTKAERGGLTNEDKARFIQRQLVETRQITKHVARMLDTRFNTKLDEAGNRIRDPKVNIITLKSNLVSQFRKDYQLYKIREINNYHHAHDAYINAVVATALLKKYPQLAPEFVYGEYPTYNSYNSRKSATEKVLFYSNIMNFFKRIVVHSKTGEVRIRPVIEVNKETGEIVWDKKSDFRTVRKVLSYPQVNVVKKTEVQNHGLDRGKPKGFYNANLSPRPKEGSVENLVPAKQSFDTKRYGGYAGISNSYAVLVNGIIEKGKKKSKAEVTEFQGISILARKDFDKNPKQYLLNLGYKDIKSIIKLPKYSLFELENGSRRMLASILSTNNKRGEIHKGNEMYLPDKFVTLLYHAMRVNRTLEPGHKKYVETHRHVFDELLIYILEYNEKIVGAKANGKRIVEAYSARKDTDNLEELCNSFINLLNLTALGSAVDFEFLGTKIPRYRDYTPSSLLKATLIHQSVTGLYETRIDLSKLGGD

SEQ ID NO: 623 - protein, 1345 aa, Streptococcus mutans G123; identical to SEQ ID NO: 600

SEQ ID NO: 624 - protein, 1345 aa, Streptococcus mutans NV1996; identical to SEQ ID NO: 609

SEQ ID NO: 625 - protein, 1345 aa, Streptococcus mutans AC4446; identical to SEQ ID NO: 600

SEQ ID NO: 626 - protein, 1368 aa, Streptococcus iniae 9117
MRKPYSIGLDIGTNSVGWAVITDDYKVPSKKMRIQGTTDRTSIKKNLIGALLFDNGETAEATRLKRTTRRRYTRRKYRIKELQKIFSSEMNELDIAFFPRLSESFLVSDDKEFENHPIFGNLKDEITYHNDYPTIYHLRQTLADSDQKADLRLIYLALAHIIKFRGHFLIEGNLDSENTDVHVLFLNLVNIYNNLFEEDIVETASIDAEKILTSKTSKSRRLENLIAEIPNQKRNMLFGNLVSLALGLTPNFKTNFELLEDAKLQISKDSYEEDLDNLLAQIGDQYADLFIAAKKLSDAILLSDIITVKGASTKAPLSASMVQRYEEHQQDLALLKNLVKKQIPEKYKEIFDNKEKNGYAGYIDGKTSQEEFYKYIKPILLKLDGTEKLISKLEREDFLRKQRTFDNGSIPHQIHLNELKAIIRRQEKFYPFLKENQKKIEKLFTFKIPYYVGPLANGQSSFAWLKRQSNESITPWNFEEVVDQEASARAFIERMTNFDTYLPEEKVLPKHSPLYEMFMVYNELTKVKYQTEGMKRPVFLSSEDKEEIVNLLFKKERKVTVKQLKEEYFSKMKCFHTVTILGVEDRFNASLGTYHDLLKIFKDKAFLDDEANQDILEEIVWTLTLFEDQAMIERRLVKYADVFEKSVLKKLKKRHYTGWGRLSQKLINGIKDKQTGKTILGFLKDDGVANRNFMQLINDSSLDFAKIIKNEQEKTIKNESLEETIANLAGSPAIKKGILQSIKIVDEIVKIMGQNPDNIVIEMARENQSTMQGIKNSRQRLRKLEEVHKNTGSKILKEYNVSNTQLQSDRLYLYLLQDGKDMYTGKELDYDNLSQYDIDHIIPQSFIKDNSIDNTVLTTQASNRGKSDNVPNIETVNKMKSFWYKQLKSGAISQRKFDHLTKAERGALSDFDKAGFIKRQLVETRQITKHVAQILDSRFNSNLTEDSKSNRNVKIITLKSKMVSDFRKDFGFYKLREVNDYHHAQDAYLNAVVGTALLKKYPKLEAEFVYGDYKHYDLAKLMIQPDSSLGKATTRMFFYSNLMNFFKKEIKLADDTIFTRPQIEVNTETGEIVWDKVKDMQTIRKVMSYPQVNIVMKTEVQTGGFSKESIWPKGDSDKLIARKKSWDPKKYGGFDSPIIAYSVLVVAKIAKGKTQKLKTIKELVGIKIMEQDEFEKDPIAFLEKKGYQDIQTSSIIKLPKYSLFELENGRKRLLASAKELQKGNELALPNKYVKFLYLASHYTKFTGKEEDREKKRSYVESHLYYFDEIMQIIVEYSNRYILADSNLIKIQNLYKEKDNFSIEEQAINMLNLFTFTDLGAPSAFKFFNGDIDRKRYSSTNEIINSTLIYQSPTGLYETRIDLSKLGGK

SEQ ID NO: 627 - protein, 1345 aa, Streptococcus constellatus subsp. constellatus SK53
MGKPYSIGLDIGTNSVGWAVVTDDYKVPAKKMKVLGNTDKQSIKKNLLGALLFDSGETAEATRLKRTARRRYTRRKNRLRYLQEIFTGEMNKVDENFFQRLDDSFLVDEDKRGEHHPIFGNIAAEVKYHDDFPTIYHLRRHLADTSKKADLRLVYLALAHMIKFRGHFLYEGDLKAENTDVQALFKDFVEEYDKTIEESHLSEITVDALSILTEKVSKSSRLENLIAHYPTEKKNTLFGNLIALSLDLHPNFKTNFQLSEDAKLQFSKDTYEEDLEGFLGEVGDEYADLFASAKNLYDAILLSGILTVDDNSTKAPLSASMVKRYEEHQKDLKKLKDFIKVNAPDQYNAIFKDKNKKGYASYIESGVKQDEFYKYLKGILLKINGSGDFLDKIDREDFLRKQRTFDNGSIPHQIHLQEMHAILRRQGEHYPFLKENQDKIEKILTFRIPYYVGPLARKGSRFAWAEYKADEKITPWNFDDILDKEKSAEKFITRMTLNDLYLPEEKVLPKHSPLYEAFTVYNELTKVKYVNEQGEAKFFDTNMKQEIFDHVFKENRKVTKDKLLNYLNKEFEEFRIVNLTGLDKENKAFNSSLGTYHDLRKILDKSFLDDKANEKTIEDIIQTLTLFEDREMIRQRLQKYSDIFTKAQLKKLERRHYTGWGRLSYKLINGIRNKENKKTILDYLIDDGYANRNFMQLINDDALSFKEEIARAQIIDDVDDIANVVHDLPGSPAIKKGILQSVKIVDELVKVMGHNPANIIIEMARENQTTDKGRRNSQQRLKLLQDSLKNLDNPVNIKNVENQQLQNDRLFLYYIQNGKDMYTGETLDINNLSQYDIDHIIPQAFIKDNSLDNRVLTRSDKNRGKSDDVPSIEVVHEMKSFWSKLLSVKLITQRKFDNLTKAERGGLTEEDKAGFIKRQLVETRQITKHVAQILDERFNTEFDGNKRRIRNVKIITLKSNLVSNFRKEFELYKVREINDYHHAHDAYLNAVVGNALLLKYPQLEPEFVYGEYPKYNSYRSRKSATEKFLFYSNILRFFKKEDIQTNEDGEIAWNKEKHIKILRKVLSYPQVNIVKKTEEQTGGFSKESILPKGESDKLIPRKTKNSYWDPKKYGGFDSPVVAYSILVFADVEKGKSKKLRKVQDMVGITIMEKKRFEKNPVDFLEQRGYRNVRLEKIIKLPKYSLFELENKRRRLLASAKELQKGNELVIPQRFTTLLYHSYRIEKDYEPEHREYVEKHKDEFKELLEYISVFSRKYVLADNNLTKIEMLFSKNKDAEVSSLAKSFISLLTFTAFGAPAAFNFFGENIDRKRYTSVTECLNATLIHQSITGLYETRIDLSKLGED

SEQ ID NO: 628 - protein, 1370 aa, Streptococcus agalactiae CF01173; identical to SEQ ID NO: 575

SEQ ID NO: 629 - protein, 1345 aa, Streptococcus mutans W6; identical to SEQ ID NO: 600

SEQ ID NO: 630 - protein, 1345 aa, Streptococcus mutans GS-5; identical to SEQ ID NO: 612

SEQ ID NO: 631 - protein, 1388 aa, Streptococcus thermophilus MN-ZLW-002
MTKPYSIGLDIGTNSVGWAVITDNYKVPSKKMKVLGNTSKKYIKKNLLGVLLFDSGITAEGRRLKRTARRRYTRRRNRILYLQEIFSTEMATLDDAFFQRLDDSFLVPDDKRDSKYPIFGNLVEEKAYHDEFPTIYHLRKYLADSTKKADLRLVYLALAHMIKYRGHFLIEGEFNSKNNDIQKNFQDFLDTYNAIFESDLSLENSKQLEEIVKDKISKLEKKDRILKLFPGEKNSGIFSEFLKLIVGNQADFRKCFNLDEKASLHFSKESYDEDLETLLGYIGDDYSDVFLKAKKLYDAILLSGFLTVTDNETEAPLSSAMIKRYNEHKEDLALLKEYIRNISLKTYNEVFKDDTKNGYAGYIDGKTNQEDFYVYLKNLLAEFEGADYFLEKIDREDFLRKQRTFDNGSIPYQIHLQEMRAILDKQAKFYPFLAKNKERIEKILTFRIPYYVGPLARGNSDFAWSIRKRNEKITPWNFEDVIDKESSAEAFINRMTSFDLYLPEEKVLPKHSLLYETFNVYNELTKVRFIAESMRDYQFLDSKQKKDIVRLYFKDKRKVTDKDIIEYLHAIYGYDGIELKGIEKQFNSSLSTYHDLLNIINDKEFLDDSSNEAIIEEIIHTLTIFEDREMIKQRLSKFENIFDKSVLKKLSRRHYTGWGKLSAKLINGIRDEKSGNTILDYLIDDGISNRNFMQLIHDDALSFKKKIQKAQIIGDEDKGNIKEVVKSLPGSPAIKKGILQSIKIVDELVKVMGGRKPESIVVEMARENQYTNQGKSNSQQRLKRLEKSLKELGSKILKENIPAKLSKIDNNALQNDRLYLYYLQNGKDMYTGDDLDIDRLSNYDIDHIIPQAFLKDNSIDNKVLVSSASNRGKSDDFPSLEVVKKRKTFWYQLLKSKLISQRKFDNLTKAERGGLLPEDKAGFIQRQLVETRQITKHVARLLDEKFNNKKDENNRAVRTVKIITLKSTLVSQFRKDFELYKVREINDFHHAHDAYLNAVIASALLKKYPKLEPEFVYGDYPKYNSFRERKSATEKVYFYSNIMNIFKKSISLADGRVIERPLIEVNEETGESVWNKESDLATVRRVLSYPQVNVVKKVEEQNHGLDRGKPKGLFNANLSSKPKPNSNENLVGAKEYLDPKKYGGYAGISNSFAVLVKGTIEKGAKKKITNVLEFQGISILDRINYRKDKLNFLLEKGYKDIELIIELPKYSLFELSDGSRRMLASILSTNNKRGEIHKGNQIFLSQKFVKLLYHAKRISNTINENHRKYVENHKKEFEELFYYILEFNENYVGAKKNGKLLNSAFQSWQNHSIDELCSSFIGPTGSERKGLFELTSRGSAADFEFLGVKIPRYRDYTPSSLLKDATLIHQSVTGLYETRIDLAKLGEG

SEQ ID NO: 632 - protein, 1370 aa, Streptococcus sanguinis SK353
MKKPYSIGLDIGTNSVGWAVVTDDYKVPAKKMRVFGDTDRSHIKKNLLGTLLFDDGNTAESRRLKRTARRRYTRRRNRILYLQEIFTESMNEIDESFFHRLDDSFLVPEDKRGSKYPIFATLQEEKEYHKQFPTIYHLRKQLADSKEKSDVRLIYLALAHMIKYRGHFLYEETFDIKNNDIQKIFNEFINIYDNTFEGSSLSGQNAQVEAIFTDKISKSAKRERVLKLFPDEKSTGLFSEFLKLIVGNQADFKKHFDLEEKAPLQFSKDTYDEELENLLGQIGDDFADLFLIAKKLYDAILLSGILTVTDPSTKAPLSASMIERYENHQKDLAALKQFIKNNLPEKYVEVFSDQSKDGYAGYIDGKTTQEAFYKYIKNLLSKFEGADYFLDKIEREDFLRKQRTFDNGSIPHQIHLQEMNAILRRQGEHYPFLKENREKIEKILTFRIPYYVGPLARDNRDFSWLTRNSDEPIRPWNFEEVVDKARSAEDFIHRMTNYDLYLPEEKVLPKHSLLYETFAVYNELTKVKFIAEGLRDYQFLDSGQKKQIVNQLFKEKRKVTEKDIIHYLHNVDGYDGIELKGIEKQFNANLSTYHDLLKITKDKEFMDDPKNEEILENIVHTLTIFEDREMIKQRLAQYDTLFDEKVIKALTRRHYTGWGKLSAKLINGIRDKQSGKTILDYLIDDDKINRNFMQLINDDGLSFKEIIQKAQVVGKTDDVKQVVQELPGSPAIKKGILQSIKIVDELVKVMGYALESIVIEMARENQTTARGKKNSQQRYKRIEDALKNLAPGLDSNILKENPTDNIQLKNDRLFLYYLQNGKDMYTGKPLDINQLSSYDIDHIIPQAFIKDDSIDNRVLTSSKDNRGKSDNVPSLEVVQKRKAFWQQLLDSKLISERKFNNLTKAERGGLDERDKVGFIRRQLVETQQITKNVAQILDARFNTEVKEKNQKIRTVKIITLKSNLVSNFRKEFGLYKVREINNYHHAHDAYLNAVVAKAILKKYPKLEPEFVYGDYQKYDLKKYISRFKPSKEIEKATEKYFFYSNLLNFFKEEVLYADGTIRKRENIEYSKDTGEIAWDKEKDFATIKKVLSYPQVNIVKKREVQTGGFSKESILPKGNSDKLIPRKTKDILWDTTKYGGFDSPVIAYSILLIADIEKGKAKKLKTVKTLVGITIMEKAAFEENPITFLENKGYHNVRKENILCLPKYSLFELENGRRRLLASAKELQKGNEIVLPVCLTTLLYHSKNLHKLDEPEHLEYIQKHRNEFKDLLNLVSEFSQKYILAEANLEKIKDLYADNEQADIEILANSFINLLTFTALGAPAAFKFFGKDVDRKRYTTVSEILNATLIHQSITGLYETRIDLSKLGEE

SEQ ID NO: 633 - protein, 1155 aa, Streptococcus dysgalactiae subsp. equisimilis SK1250
MDKKYSIGLDIGTNSVGWAVITDDYKVPSKKFKVLGNTDRHSIKKNLIGALLFDSGETAEATRLKRSARRRYTRRKNRIRYLQEIFSSEMSKVDDSFFHRLEESFLVEEDKKHERHPIFGNIVDEVAYHEKYPTIYHLRKKLADSTDKADLRLIYLALAHMIKFRGHFLIEGDLNPDNSDMDKLFIQLVQTYNQLFEENPINASRVDAKAILSARLSKSRRLENLIAQLPGEKRNGLFGNLIALSLGLTPNFKSNFDLAEDAKLQLSKDTYDDDLDNLLAQIGDQYADLFLAAKNLSDAILLSDILRVNSEITKAPLSASMIKRYDEHHQDLTLLKALVRQQLPEKYKEIFFDQSKNGYAGYIDGGASQEEFYKFIKPILEKMDGTEELLAKLNREDLLRKQRTFDNGSIPHQIHLGELHAILRRQEDFYPFLKDNREKIEKILTFRIPYYVGPLARGNSRFAWMTRKSEETITPWNFEEVVDKGASAQSFIERMTNFDKNLPNEKVLPKHSLLYEYFTVYNELTKVKYVTEGMRKPEFLSGKQKEAIVDLLFKTNRKVTVKQLKEDYFKKIECFDSVEISGVEDRFNASLGTYHDLLKIIKDKDFLDNEENEDILEDIVLTLTLFEDKEMIEERLKTYAHLFDDKVMKQLKRRHYTGWGRLSRKLINGIRDKQSGKTILDFLKSDGFANRNFIQLIHDDSLTFKEAIQKAQVSGQGHSLHEQIANLAGSPAIKKGILQSVKVVDELVKVMGHKPENIVIEMARENQTTQKGQKNSRERMKRIEEGIKELGSQILKEHPVENTQLQNEKLYLYYLQNRRDMYVDQELDINRLSDYDVDHIVPQSFIKDDSIDNKVLTRSDKNRGKSDDVPSEEVVKKMKNYWRQLLNAKLITQRKFDNLTKAERGGLSELDKAGFIKRQLVETRQITKHVAQILDSRMNTKYDENDKLIREVKVITLKSKLVSDFRKDFQFYKVREINNYHHAHDAYLNAVVGTALIKKYPKLESEFVYGDYKVYDVRKMIAKSEQEIGKATAKRFFYSNIMNFFKTEITLANGEIRKRPLIETNEETGEIVWDKGRDFATVRKVLSMPQVNIVKKTEVQTGALTNESIYARGSFDKLISRKHRFESSKYGGFGSPTVTYSVLVVAKYQSYKMEK

SEQ ID NO: 634 - protein, 153 aa, Streptococcus dysgalactiae subsp. equisimilis SK1250
MANNNSRGDLQKANEMFLPAKLVTLLYHAHKIESSKELEHEAYILDHYNDLYQLLSYIERFASLYVDVEKNISKVKELFSNIESYSISEICSSVINLLTLTASGAPADFKFLGTTIPRKRYGSPQSILSSTLIHQSITGLYETRIDLSQLGGD

SEQ ID NO: 635 - protein, 1345 aa, Streptococcus mutans B; identical to SEQ ID NO: 600

SEQ ID NO: 636 - protein, 1370 aa, Streptococcus agalactiae SA20-06
MNKPYSIGLDIGTNSVGWSIITDDYKVPAKKMRVLGNTDKEYIKKNLIGALLFDGGNTAADRRLKRTARRRYTRRRNRILYLQEIFAEEMSKVDDSFFHRLEDSFLVEEDKRGSKYPIFATMQEEKDYHEKFPTIYHLRKELADKKEKADLRLVYLALAHIIKFRGHFLIEDDRFDVRNTDIQKQYQAFLEIFDTSFENNHLLSQNVDVEAILTDKISKSAKKDRILAQYPNQKSTGIFAEFLKLIVGNQADFKKHFNLEDKTPLQFAKDSYDEDLENLLGQIGDEFADLFSAAKKLYDSVLLSGILTVTDLSTKAPLSASMIQRYDEHREDLKQLKQFVKASLPEKYQEIFADSSKDGYAGYIEGKTNQEAFYKYLSKLLTKQEDSEYFLEKIKNEDFLRKQRTFDNGSIPHQVHLTELKAIIRRQSEYYPFLKENQDKIEKILTFRIPYYVGPLARGNSDFAWMTRKTDDSIRPWNFEDLVDKEKSAEAFIHRMTNNDLYLPEEKVLPKHSLIYEKFTVYNELTKVRYKNEQGETYFFDSNVKQEIFDGVFKEHRKVSKKQLLDFLAKEFEEFRIVDVTGLDKENKAFNASLGTYHDLKKILDKDFLDNPDNESILEDIVQTITLFEDREMIKKRLENYKDLFTESQLKKLYRRHYTGWGRLSAKLINGIRDRESQKTILDYLISDGRANRNFMQLINDDGLSFKSIISKAQSGSHSDNLKEVVGELAGSPAIKKGILQSLKIVDELVKVMGYEPEQIVVEMARENQTTNQGRRNSRQRYKLLEDGVKNLASDLNGDILKEYPTDNQALQNERLFLYYLQNGRDMYTGEALDIDNLSQYDIDHIVPQAFIKDDSIDNRVLVSSAKNRGKSDDVPSIDIVKARKAFWKKLLDAKLISQRKYDNLTKAERGGLTPDDKAGFIQRQLVETRQITKHVARILDERFNNKVDDNNKPIRKVKIVTLKSNLVSNFRKEFGFYKIREVNNYHHAHDAYLNAVVAKAILTKYPQLEPEFVYGDYPKYNSYKTRKSATEKLFFYSNIMNFFKTKVTLADETVVVKDDIEVNNETGEIAWDKKKHFATVRKVLSYPQVNIVKKTEVQTGGFSKESILAHSNSDKLIPRKTKDIYLDPKKYGGFDSPIVAYSVLVLADIKKGKAQKLKTVKELIGITIMERERFEKNPSAFLESKGYLNIRTDKLIILPKYSLFELENGRRRLLASAGELQKGNELALPTQYMKFLYLASRYNESKGKPEEIEKKQEFVNQHVSYFDDILQLINDFSKRVILADANLEKINKLYSDNKDNTPVDELAKNIINLFTFTSLGAPAAFKFFDKSVDRKRYTSTKEVLDSTLIHQSITGLYETRIDLGKLGED

SEQ ID NO: 637 - protein, 1392 aa, Streptococcus mitis SK321
MNNNNYSIGLDIGTNSVGWAVITDDYKVPSKKMKVLGNTDKHFIKKNLIGALLFDEGATAEDRRFKRTARRRYTRRKNRLRYLQEIFSEEMSKVDSSFFHRLDDSFLVPEDKRGSKYPIFATLAEEKEYHKKFPTIYHLRKHLADSKEKTDLRLIYLALAHMIKYRGHFLYEESFDIKNNDIQKIFSEFISIYDNTFEGSSLSGQNAQVEAIFTDKISKSAKRERILKLFAYEKSTDLFSEFLKLIVGNQADFKKHFDLEEKAPLQFSKDTYDEDLENLLGQIGDDFADLFLVAKKLYDAILLSGILTVTDSSTKAPLSASMIERYENHQKDLAALKQFIQNNLQEKYDEVFSDQSKDGYARYINGKTTQEAFYKYIKNLLSKFEGSDYFLDKIEREDFLRKQRTFDNGSIPHQIHLQEMNAIIRRQGEHYPFLKEYKEKIETILTFRIPYYVGPLARGNRNFAWLTRNSDQAIRPWNFEEIVDQASSAEEFINKMTNYDLYLPEEKVLPKHSLLYETFAVYNELTKVKFISEGLRDYQFLDSGQKKQIVNQLFKEKRKVTEKDIIQYLHNVDGYDGIELKGIEKQFNASLSTYHDLLKIIKDKEFMDDPKNEEILENIVHTLTIFEDREMIKQRLAQYASIFDKKVIKALTRRHYTGWGKLSAKLINGICDKKTGKTILDYLIDDGYSNRNFMQLINDDGLSFKDIIQKAQVVGKTNDVKQVVQELPGSPAIKKGILQSIKLVDELVKVMGHAPESIVIEIARENQTTARGKKNSQQRYKRIEDALKNLAPGLDSNILKEHPTDNIQLQNDRLFLYYLQNGKDMYTGEALDINQLSSYDIDHIVPQAFIKDDSLDNRVLTSSKDNRGKSDNVPSLEVVQKRKAFWQQLLDSKLISEHKFNNLTKAERGGLDERDKVGFIRRQLVETRQITKHVAQILDARFNTEVNEKDKKNRTVKIITLKSNLVSNFRKEFKLYKVREINDYHHAHDAYLNAVVAKAILKKYPKLEPGFVYGDYQKYDIKRYISRSKDPKEVEKATEKYFFYSNLLNFFKEEVHYADGTIVKRENIEYSKDTGEIAWNKEKDFATIKKVLSLPQVNIVKKTEIQTHGLDRGKPRGLFNSNPSPKPSEDRKENLVPIKQGLDPRKYGGYAGISNSYAVLVKAIIEKGAKKQQKTVLEFQGISILDKINFEKNKENYLLEKGYIKILSTITLPKYSLFEFPDGTRRRLASILSTNNKRGEIHKGNELVIPEKYTTLLYHAKNINKTLEPEHLEYVEKHRNDFAKLLEYVLNFNDKYVGALKNGERIRQAFIDWETVDIEKLCFSFIGPRNSKNAGLFELTSQGSASDFEFLGVKIPRYRDYTPSSLLNATLIHQSITGLYETRIDLSKLGED

SEQ ID NO: 638 - protein, 1377 aa, Streptococcus sp. C300
MNNKPYSIGLDIGTNSVGWSVITDDYKVPSKKMKVLGNTDKRFIKKNLIGALLFDEGTTAEARRLKRTARRRYTRRKNRLRYLQEIFAEEMSKVDSSFFHRLDDSFLIPEDKRGSKYPIFATLVEEKEYHKQFPTIYHLRKQLADSKEKADLRLIYLVLAHMIKYRGHFLYEEAFDIKNNDIQKIFNEFISIYDNTFEGSSLSGQNAQVETIFTDKISKSAKRERVLKLFPDEKSTGLFSEFLKLIVGNQADFKKHFDLEEKAPLQFSKDTYDEDLENLLEQIGDDFADLFVAAKKLYDAILLSGILTVTDPSTKAPLSASMIERYENHQKDLAVLKQFIKTNLPEKYVEVFSDQSKDGYAGYIDGKTTQEAFYKYIKNLLSKFDGADYFLDKIEREVFLRKQRTFDNGSIPHQIHLQEMNTILRRQGEHYPFLKENKEKIEKILTFRIPYHVGPLARGNRDFAWLTRNSDQAIRPWNFEEIVDKASSAEDFINKMTNYDLYLPEEKVLPKHSLLYETFAVYNELTKVKFIAEGMRDYQFLDSGQKKKIINQLFKKKRKVTEDDIIDCLQKIDNYDGIELKGIEKQFNASLSTYHDILKIIRDKEFMDDPKNGDILENVIHTLTIFEDREMIKQRLAQYNSIFDEKVIKALSRKHYTGWGKLSAKLIDGIRDKQTGKTILDYLMDDGKSNRNFMQLIKDDELSFTEIIQKAQVVGDTDNLRQVVQNLPGSPAIKKGILQSIKIVDELVKVMGHAPESIVIEMARENQTTARGKKNSQQRYKRIEDSLKNLASGLDSNILKENPTDNIQLQNDRLFLYYLQNGKDMYTGEALNINQLSSYDIDHIIPQAFIKDDSLDNRVLTSSKDNRGKSDNVPSLEVVEKMKAFWQQLLDSKLISERKYNNLTKAERERGGLNELDKVGFIKRQLVETRQITKHVAQILDARFNKEVTEKNKKNRNVKIITLKSNMVSNFRKEFGLYKVREINDYHHAHDAYLNAVVAKAILKKYPKLEPEFVYGDYQKYDLKRYISRSKDPKEVEKATEKYFFYSNLLNFFKEEVHYADGTIVKRENIEYSKDTGEIAWNKEKDFATIKKVLSLPQVNIVKKTEEQTVGQNGGLFDNNIVSKKKVVDASKLIPIKSGLSPEKYGGYARPTIAYSVLVTYKQNNKIKNTMVGIPVLTKLEFERDPNLYLRNLGINNVSHVIKLVKYTVLEFKHKYGTYRRFIVSNQELKRANQIFVTTKQMKLISQYTTLDKNEHDSLLKNNQQLIQSIWNQFLEFMLATDLVNKKQYDELILTNNQTIEECRNIMNRVITTLSFTNINAGQKKIIFDDTLSLPIKRWQFTDSDKMVKKIIESTLIHQSITGLYETRIDLSKLGED

SEQ ID NO: 639 - protein, 1345 aa, Streptococcus mutans 14D; identical to SEQ ID NO: 600

SEQ ID NO: 640 - protein, 1345 aa, Streptococcus mutans 5DC8
MKKPYSIGLDIGTNSVGWAVVTDDYKVPAKKMKVLGNTDKSHIKKNLLGALLFDSGNTAEDRRLKRTARRRYTRRRNRILYLQEIFSEEMGKVDDSFFHRLEDSFLVTEDKRGERHPIFGNLEEEVKYHENFPTIYHLRQYLADNPEKTDLRLVYLALAHIIKFRGHFLIEGKFDTRNNDVQRLFQEFLAVYDNTFENSSLQEQNVQVEEILTDKISKSAKKDRVLKLFPNEKSNGRFAEFLKLIVGNQADFKKHFELEEKAPLQFSKDIYEEELEVLLAQIGDNYAELFLSAKKLYDSILLSGILTVTDVSTKAPLSASMIQRYNEHQMDLAQLKQFIRQKLSDKYNEVFSDVSKDGYAGYIDGKTNQEAFYKYLKGLLNKIEGSGYFLDKIEREDFLRKQRTFDNGSIPHQIHLQEMRAIIRRQAEFYPFLADNQDRIEKILTFRIPYYVGPLARGKSDFAWLSRKSADKITPWNFDEIVDKESSAEAFINRMTNYDLYLPNQKVLPKHSLLYEKFTVYNELTKVKYKTEQGKTAFFDANMKQEIFDGVFKVYRKVTKDKLMDFLEKEFDEFRIVDLTGLDKENKAFNASYGTYHDLRKILDKDFLDNSKNEKILEDIVLTLTLFEDREMIRKRLKNYSDLLTKEQLKKLERRHYTGWGRLSAELIHGIRNKESRKTILDYLIDDGNSNRNFMQLINDDALSFKEEIAKAQVIGETDNLNQVVSDIAGSLAIKKGILQSLKIVDELVKIMGHQPENIVVEMARENQFTNQGRRNSQQRLKGLTDSIKEFGSQILKEHPVENSQLQNDRLFLYYLQNGRDMYTGEELDIDYLSQYDIDHIIPQAFIKDNSIDNRVLTSSKENRGKSDDVPSKDVVRKMKSYWSKLLSAKLITQRKFDNLTKGERGGLTDDDKAGFIKHQLVETRQITKHVARILDERFNTETDENNKKIRQVKIVTLKSNLVSNFRKEFELYKVREINDYHHAHDAYLNAVIGKALLGVYPQLEPEFVYGDYPHFHGHKENKATAKKFFYSNIMNFFKKDDVRTDKNGEIIWKKDEYISNIKKVLSYPQVNIVKKVEEQTGGFFKESILPKGDSDKLIPRKTKKFYWDTKKYGGFDSPIVAYSILVIADIEKGKSKKLKTVKALVGVTIMEKMTFERDPVAFLERKGYRNVQEENIIKLPKYSLFKLENGRKRLLASARELQKGNEIVLPNHLGTLLYHAKNIHKVDEPKHLDYVDKHKDEFKELLDVVSNFSKKYTLAEGNLEKIKELYAQNNGEDLKELASSFINLLTFTAIGAPATFKFFDKNIDRKRYTSTTEILNATLIHQSITGLYETRIDLSKLGGD

SEQ ID NO: 641 - protein, 1345 aa, Streptococcus mutans SF1; identical to SEQ ID NO: 609

SEQ ID NO: 642 - protein, 1350 aa, Streptococcus mutans 24; identical to SEQ ID NO: 582

SEQ ID NO: 643 - protein, 1386 aa, Streptococcus anginosus SK1138
MNQKYSIGLDIGTNSVGWAVITDDYKVPAKKMKVLGNTDKQSIKKNLLGALLFDSGETAEATRLKRTARRRYTRRRNRLRYLQEIFAEEMMQVDESFFQRLDDSFLVDEDKRGERHPIFGNIAAEVKYHDEFPTIYHLRKHLADISQKADLRLVYLALAHMIKFRGHFLIEGQLKAENTNVQALFKDFVEVYDKTVEESHLSEITVDALSILTEKVSKSRRLENLIAHYPAEKKNTLFGNLIALFLGLQPNFKTNFQLSEDAKLQFSKDTYEEDLEGLLGEVGDEYADLFASAKNLYDAILLSGILTVDDNSTKAPLSASMVKRYEEHQKDLKKFEDFIKVNALDQYNAIFKDKNKKGYAGYIESGVKQDEFYKYLKGILLQINGSGDFLDKIDREDFLRKQRTFDNGSIPHQIHLQEMHAILRRQGEHYPFLKENQDKIEKILTFRIPYYVGPLARKGSRFAWAEYKADEKITPWNFDDILDKEKSAEKFITRMTLNDLYLPEEKVLPKHSLLYETFTVYNELTKVKYVNEQGEAKFFDANMKQEIFDHVFKENRKVTKDKLLNYLNKEFEEFRIVNLTGLDKENKVFNSSLGTYHDLRKILNKSFLDNKENAQIIEDIIQTLTLFEDREMIRQRLQKYSDIFTKAQLKKLERRHYTGWGRLSYKLINGIRNKENKKTILDYLIDDGYANRNFMQLINDDALSFKEEIAKAQIIGDVDDIANVVHDLPGSPAIKKGILQSVKIVDELVKVMGHNPANIIIEMARENQTTDRGRRNSQQRLKLLQDSLKNLDNPVNIKNVENQQLQNDRLFLYYIQNGKDMYTGETLDINNLSQYDIDHIIPQAYIKDDSFDNRVLTSSSENRGKSDNVPSIEVVCARKADWMRLRKAGLISQRKFDNLTKAERGGLTENDKAGFIKRQLVETRQITKHVAQVLDARFNAKHDENKKVIRDVKIITLKSNLVSQFRKDFKFYKVREINDYHHAHDAYLNAVIGTALLKKYPKLASEFVYGEFKKYDVRKFIAKSDKEIGKATAKYFFYSNLMNFFKKEVKFADGTVVERPDIETSEDGEIAWNKQTDFKIVRKVLSYPQVNIVKKTEVQTHGLDRGKPRGLFNANPSPKPKPDSSENLVGVKRNLDPKKYGGYAGISNSYAVLVKAIIEKGVKKKETMVLEFQGISILDRITFEKDKRAFLLGKGYKDIKKIIELPKYSLFELKDGSRRMLASILSTNNKRGEIHKGNELFVPQKFTTLLYHAKRINNPINKDHIEYVKKHRDDFKELLNYVLEFNEKYVGATKNGERLKEAVADFDSKSNEEICTSFLGAVNSKNAGLFELTSLGSASDFEFLGVKIPRYRDYTPSSLLKDSTLIHQSITGLYETRIDLSKLGED

SEQ ID NO: 644 - protein, 1345 aa, Streptococcus mutans SM6
MKKPYSIGLDIGTNSVGWAVVTDDYKVPAKKMKVLGNTDKSHIKKNLLGALLFDSGNTAEDRRLKRTARRRYTRRRNRILYLQEIFSEEMGKVDDSFFHRLEDSFLVTEDKRGERHPIFGNLEEEVKYHENFPTIYHLRQYLADNPEKTDLRLVYLALAHIIKFGGHFLIEGKFDTRNNDVQRLFQEFLAVYDNTFENSSLQEQNVQVEEILTDKISKSAKKDRVLKLFPNEKSNGRFAEFLKLIVGNQADFKKHFELEEKAPLQFSKDIYEEELEVLLAQIGDNYAELFLSAKKLYDSILLSGILTVTDVSTKAPLSASMIQRYNEHQMDLAQLKQFIRQKLSDKYNEVFSDVSKDGYAGYIDGKTNQEAFYKYLKGLLNKIEGSGYFLDKIEREDFLRKQRTFDNGSIPHQIHLQEMRAIIRRQAEFYPFLADNQDRIEKILTFRIPYYVGPLARGKSDFAWLSRKSADKITPWNFDEIVDKESSVEAFINRMTNYDLYLPNQKVLPKHSLLYEKFTVYNELTKVKYKTEQGKTAFFDANMKQEIFDGVFKVYRKVTKDKLMDFLEKEFDEFRIVDLTGLDKENKAFNASYGTYHDLRKILDKDFLDNSKNEKILEDIVLTLTLFEDREMIRKRLKNYSDLLTKEQLKKLERRHYTGWGRLSAELIHGIRNKESRKTILDYLIDDGNSNRNFMQLINDDALSFKEEIAKAQVIGETDNLNQVVSDIAGSPAIKKGILQSLKIVDELVKIMGHQPENIVVEMARENQFTNQGRRNSQQRLKGLTDSIKEFGSQILKEHPVENSQLQNDRLFLYYLQNGRDMYTGEELDIDYLSQYDIDHIIPQAFIKDNSIDNRVLTSSKENRGKSDDVPSKNVVRKMKSYWSKLLSAKLITQRKFDNLTKAERGGLTDDDKAGFIKRQLVETRQITKHVARILDERFHTETDENNKKIRQVKIVTLKSNLVSNFRKEFELYKVREINDYHHAHDAYLNAVIGKALLGVYPQLEPEFVYGDYPHFHGHKENKATAKKFFYSNIMNFFKKDDVRTDKNGEIIWKKDEHISNIKKVLSYPQVNIVKKVEEQTGGFSKESILPKGNSDKLIPRKTKKFYWDTKKYGGFDSPIVAYSILVIADIEKGKSKKLKTVKALVGVTIMEKMTFERDPVAFLERKGYRNVQEENIIKLPKYSLFKLENGRKRLLASARELQKGNEIVLPNHLGTLLYHAKNIHKVDEPKHLDYVDKHKDEFKELLDVVSNFSKKYTLAEGNLEKIKELYAQNNGEDLKELASSFINLLTFTAIGAPATFKFFDKNIDRKRYTSTTEILNATLIHQSITGLYETRIDLSKLGGD

SEQ ID NO: 645 - protein, 1375 aa, Streptococcus canis FSL Z3-227
MEKKYSIGLDIGTNSVGWAVITDDYKVPSKKFKVLGNTNRKSIKKNLMGALLFDSGETAEATRLKRTARRRYTRRKNRIRYLQEIFANEMAKLDDSFFQRLEESFLVEEDKKNERHPIFGNLADEVAYHRNYPTIYHLRKKLADSPEKADLRLIYLALAHIIKFRGHFLIEGKLNAENSDVAKLFYQLIQTYNQLFEESPLDEIEVDAKGILSARLSKSKRLEKLIAVFPNEKKNGLFGNIIALALGLTPNFKSNFDLTEDAKLQLSKDTYDDDLDELLGQIGDQYADLFSAAKNLSDAILLSDILRSNSEVTKAPLSASMVKRYDEHHQDLALLKTLVRQQFPEKYAEIFKDDTKNGYAGYVGIGIKHRKRTTKLATQEEFYKFIKPILEKMDGAEELLAKLNRDDLLRKQRTFDNGSIPHQIHLKELHAILRRQEEFYPFLKENREKIEKILTFRIPYYVGPLARGNSRFAWLTRKSEEAITPWNFEEVVDKGASAQSFIERMTNFDEQLPNKKVLPKHSLLYEYFTVYNELTKVKYVTERMRKPEFLSGEQKKAIVDLLFKTNRKVTVKQLKEDYFKKIECFDSVEIIGVEDRFNASLGTYHDLLKIIKDKDFLDNEENEDILEDIVLTLTLFEDREMIEERLKTYAHLFDDKVMKQLKRRHYTGWGRLSRKMINGIRDKQSGKTILDFLKSDGFSNRNFMQLIHDDSLTFKEEIEKAQVSGQGDSLHEQIADLAGSPAIKKGILQTVKIVDELVKVMGHKPENIVIEMARENQTTTKGLQQSRERKKRIEEGIKELESQILKENPVENTQLQNEKLYLYYLQNGRDMYVDQELDINRLSDYDVDHIVPQSFIKDDSIDNKVLTRSVENRGKSDNVPSEEVVKKMKNYWRQLLNAKLITQRKFDNLTKAERGGLSEADKAGFIKRQLVETRQITKHVARILDSRMNTKRDKNDKPIREVKVITLKSKLVSDFRKDFQLYKVRDINNYHHAHDAYLNAVVGTALIKKYPKLESEFVYGDYKVYDVRKMIAKSEQEIGKATAKRFFYSNIMNFFKTEVKLANGEIRKRPLIETNGETGEVVWNKEKDFATVRKVLAMPQVNIVKKTEVQTGGFSKESILSKRESAKLIPRKKGWDTRKYGGFGSPTVAYSILVVAKVEKGKAKKLKSVKVLVGITIMEKGSYEKDPIGFLEAKGYKDIKKELIFKLPKYSLFELENGRRRMLASATELQKANELVLPQHLVRLLYYTQNISATTGSNNLGYIEQHREEFKEIFEKIIDFSEKYILKNKVNSNLKSSFDEQFAVSDSILLSNSFVSLLKYTSFGASGGFTFLDLDVKQGRLRYQTVTEVLDATLIYQSITGLYETRTDLSQLGGD

SEQ ID NO: 646 - protein, 1368 aa, Streptococcus pyogenes HKU QMH11M0907901
MDKKYSIGLDIGTNSVGWAVITDDYKVPSKKFKVLGNTDRHSIKKNLIGALLFDSGEIAEATRLKRTARRRYTRRKNRICYLQEIFSNEMAKVDDSFFHRLEESFLVEEDKKHERHPIFGNIVDEVAYHEKYPTIYHLRKKLVDSTDKADLRLIYLALAHMIKFRGHFLIEGDLNPDNSDVDKLFIQLVQTYNQLFEENPINASGVDAKAILSARLSKSRRLENLIAQLPGEKKNGLFGNLIALSLGLTPNFKSNFDLAEDAKLQLSKDTYDDDLDNLLAQIGDQYADLFLAAKNLSDAILLSDILRLNSEITKAPLSASMIKRYDEHHQDLTLLKALVRQQLPEKYKEIFFDQSKNGYAGYIDGGASQEEFYKFIKPILEKMDGTEELLAKLNREDLLRKQRTFDNGSIPHQIHLGELHAILRRQEDFYPFLKDNREKIEKILTFRIPYYVGPLARGNSRFAWMTRKSEETITPWNFEEVVDKGASAQSFIERMTNFDKNLPNEKVLPKHSLLYEYFTVYNELTKVKYVTEGMRKPAFLSGEQKKAIVDLLFKTNRKVTVKQLKEDYFKKIECFDSVEISGVEDRFNASLGTYHDLLKIIKDKDFLDNEENEDILEDIVLTLTLFEDREMIEERLKTYAHLFDDKVMKQLKRRRYTGWGRLSRKLINGIRDKQSGKTILDFLKSDGFANRNFMQLIHDDSLTFKEDIQKAQVSGQGDSLHEHIANLAGSPAIKKGILQTVKVVDELVKVMGRHKPENIVIEMARENQTTQKGQKNSRERMKRIEEGIKELGSQILKEHPVENTQLQNEKLYLYYLQNGRDMYVDQELDINRLSDYDVDHIVPQSFIKDDSIDNKVLTRSDKNRGKSDNVPSEEVVKKMKNYWRQLLNAKLITQRKFDNLTKAERGGLSELDKAGFIKRQLVETRQITKHVAQILDSRMNTKYDENDKLIREVKVITLKSKLVSDFRKDFQFYKVREINNYHHAHDAYLNAVVGTALIKKYPKLESEFVYGDYKVYDVRKMLAKSEQEIGKATAKYFFYSNIMNFFKTEITLANGEIRKRPLIETNGETGEIVWDKGRDFATVRKVLSMPQVNIVKKTEVQTGGFSKESILPKRNSDKLIARKKDWDPKKYGGFDSPTVAYSVLVVAKVEKGKSKKLKSVKELLGITIMERSSFEKNPIDFLEAKGYKEVRKDLIIKLPKYSLFELENGRKRMLASAGELQKGNELALPSKYVNFLYLASHYEKLKGSPEDNEQKQLFVEQHKHYLDEIIEQISEFSKRVILADANLDKVLSAYNKHRDKPIREQAENIIHLFTLTNLGAPTAFKYFDTTIDRKRYTSTKEVLDATFIHQSITGLYETRIDLSQLGGD

SEQ ID NO: 647 - protein, 1370 aa, Streptococcus agalactiae GB00112
MNKPYSIGLDIGTNSVGYSVVTDDYKVPAKKMRVLGNTDKEYIKKNLIGALLFDGGNTASDRRLKRTARRRYTRRRNRILYLQEIFAEEMSKVDDSFFHRLEDSFLVEDDKRGSKYPIFATMQEEKDYHEKFPTIYHLRKELADKKEKADLRLVYLALAHIIKFRGHFLIEDDSFDVRNTDIQRQYQAFLEIFDTTFENNHLLSQNIDVEGILTDKISKSAKKDRILAQYPNQKSTGIFAEFLKLIVGNQADFKKHFNLEDKTPLQFAKDSYDEDLENLLGQIGDEFADLFSVAKKLYDSVLLSGILTVTDLSTKAPLSASMIQRYDEHREDLKQLKQFVKASLPEKYQEIFTDSSKDGYAGYIEGKTNQGAFYKYLSKLLTKQEGSEYFLEKIKNEDFLRKQRTFDNGSIPHQVHLTELKAIIRRQSEYYPFLKENLDRIEKILTFRIPYYVGPLAREKSDFAWMTRKTDDSIRPWNFEELVDKEASAEAFIHRMTNNDLYLPEEKVLPKHSLIYEKFTVYNELTKVRYKNEQGETYFFDSNIKQEIFDGVFKEHRKVSKKKLLDFLAKEYEEFRIVDVIGLDKENKAFNASLGTYHDLKKILDKDFLDNPDNESILEDIVQTLTLFEDREMIKKRLENYKDLFTESQLKKLYRRHYTGWGRLSAKLINGIRDKESQKTILDYLISDGRANRNFMQLIHDDGLSFKPIIDKAQAGSHSDNLKEVVGELAGSPAIKKGILQSLKIVDELVKVMGYEPEQVVVEMARENQTTNQGRRNTRQRYKLLEEGVKNLASDLNGNILKEYPTDNQALQNERLFLYYLQNGRDMYTGEALDIDNLSQYDIDHIVPQAFIKDDSIDNRVLVSSAKNRGKSDNVPSIDIVKARKAFWKKLLDAKLMSQRKYDNLTKAERGGLTSDDKARFIQRQLVETRQITKHVARILDERFNNELDSKGRRIRKVKIVTLKSNLVSNFRKEFGFYKIREVNDYHHAHDAYLNAVVAKAILTKYPQLEPEFVYGDYPKYNSYKTRKSATEKLFFYSNIMNFFKTKVTLADGTVVVKDDIEVNNDTGEIVWDKKKHFATVRKVLSYPQVNIVKKTEIQTGGFSKESILAHGNSDKLIPRKTKDIYLDPKKYGGFDSPIVAYSVLVVADIKKGKAQKLKTVTELLGITIMERFRFEKNPSAFLESKGYLNIRDDKLMILPKYSLFELENGRRRLLASAGELQKGNELALPTQYMKFLYLASRYNELKGKPEEIEQKQEFVVQHVSYFDDILQIINDFSNRVILADANLEKINKLYQDNKENISVDELANNIINLFTFTSLGAPAAFKFFDKIVDRKRYTSTKEVLNSTLIHQSITGLYETRIDLGKLGED

SEQ ID NO: 648 - protein, 1378 aa, Streptococcus agalactiae ATCC 13813
MNKPYSIGLDIGTNSVGWSIITDDYKVPAKKMRVLGNTDKEYIKKNLIGALLFDGGNTAADRRLKRTARRRYTRRRNRILYLQEIFAEEMSKVDDSFFHRLEDSFLVEEDKRGSKYPIFATMQEEKYYHEKFPTIYHLRKELADKKEKADLRLIYLALAHIIKFRGHFLIEDDRFDVRNTDIQKQYQAFLEIFDTTFENNDLLSQNVDVEAILTDKISKSAKKDRILARYPNQKSTGIFAEFLKLIVGNQADFKKHFNLEDKTPLQFAKDSYDEDLENLLGQIGDEFADLFSAAKKLYDSVLLSGILTVIDLSTKAPLSASMIQRYDEHHEDLKHLKQFVKASLPENYREVFADSSKDGYAGYIEGKTSQEAFYKYLLKLLTKQEGSEYLLEKIKNEDFLRKQRTFDNGSIPHQVHLTELRAIIRRQSEYYPFLKENLDRIEKILTFRIPYYVGPLAREKSDFAWMTRKTDDSIRPWNFEDLVDKEKSAEAFIHRMTNNDLYLPEEKVLPKHSLIYEKFTVYNELTKVRFLAEGFKDFQFLNRKQKETIFNSLFKEKRKVTEKDIISFLNKVDGYEGIAIKGIEKQFNASLSTYHDLKKILGKDFLDNTDNELILEDIIQTLTLFEDREMIKKRLDIYKDFFTESQLKKLYRRHYTGWGRLSAKLINGIRNKENQKTILDYLIDDGSANRNFMQLIKDAGLSFKPIIDKARTGSHSDNLKEVVGELAGSPAIKKGILQSLKIVDELVKVMGYEPEQIVVEMARENQTTAKGLSRSRQRLTTLRESLGNLKSNILEEKKPKYVKDQVENHHLSDDRLFLYYLQNGKDMYTDDELDIDNLSQYDIDHIIPQAFIKDDSIDNRVLVSSAKNRGKSDDVPSIEIVKARKMFWKNLLDAKLMSQRKYDNLTKAERGGLTSDDKARFIQRQLVETRQITKHVARILDERFNNELDSKGRRIRKVKIVTLKSNLVSNFRKEFGFYKIREVNNYHHAHDAYLNAVVAKAILTKYPQLEPEFVYGLYRRKKLSKIVREDKEEKYSEATRKMFFYSNLMNMFKRVVRLADGSIVVRPVIETGRYMGKTAWDKKKHFATVRKVLSYPQNNIVKKTEIQTGGFSKESILAHGNSDKLIPRKTKDIYLDPKKYGGFDSPIVAYSVLVVADIKKGKAQKLKTVTELLGITIMERSRFEKNTSAFLESKGYLNIRDDKLMILPKYSLFELENGRRRLLASAGELQKGNELALPTQFMKFLYLASRYNESKGKPEEIEKKQEFVNQHVSYFDDILQLINDFSNRVILADANLEKINKLYQDNKENIPVDELANNIINLFTFTSLGAPAAFKFFDKIVDRKRYTSTKEVLNSTLIHQSITGLYETRIDLGKLGEG

SEQ ID NO: 649 - protein, 1338 aa, Streptococcus mutans NLML4
MDLIGTNSVGWAVVTDDYKVPAKKMKVLGNTDKSHIKKNLLGALLFDSGNTAADRRLKRTARRRYTRRRNRILYLQEIFAEEMSKVDDSFFHRLEDSFLVTEDKRGERHPIFGNLEEEVKYHENFPTIYHLRQYLADNPEKVDLRLVYLALAHIIKFRGHFLIEGKFDTRNNDVQRLFQEFLAVYDNTFENSSLQEQNVQVEEILTDKISKSAKKDRVLKLFPNEKSNGRFAEFLKLIVGNQADFKKHFELEEKAPLQFSKDTYEEELEVLLAQIGDNYAELFLSAKKLYDSILLSGILTVTDVSTKAPLSASMIQRYNEHQMDLAQLKQFIRQKLSDKYNEVFSDVSKDGYAGYIDGKTNQEAFYKYLKGLLNKIEGSGYFLDKIEREDFLRKQRTFDNGSIPHQIHLQEMRAIIRRQAEFYPFLADNQDRIEKILTFRIPYYVGPLARGKSDFAWLSRKSADKITPWNFDEIVDKESSAEAFINRMTNYDLYLPNQKVLPKHSLLYEKFTVYNELTKVKYKTEQGKTAFFDANMKQEIFDGVFKVYRKVTKDKLMDFLEKEFDEFRIVDLTGLDKENKAFNASYGTYHDLRKILDKDFLDNSKNEKILEDIVLTLTLFEDREMIRKRLENYSDLLTKEQVKKLERRHYTGWGRLSAELIHGIRNKESRKTILDYLIDDGNSNRNFMQLINDDALSFKEEIAKAQVIGETDNLNQVVSDIAGSPAIKKGILQSLKIVDELVKIMGHQPENIVVEMARENQFTNQGRRNSQQRLKGLTDSIKEFGSQILKEHPVEHSQLQNDRLFLYYLQNGRDMYTGEELDIDYLSQYDIDHIIPQAFIKDNSIDNRVLTSSKENRGKSDDVPSKNVVRKMKSYWSKLLSAKLITQRKFDNLTKAERGGLTDDDKAGFIKRQLVETRQITKHVARILDERFHTETDENNKKIRQVKIVTLKSNLVSNFRKEFELYKVREINDYHHAHDAYLNAVIGKALLGVYPQLEPEFVYGDYPHFHGHKENKATAKKFFYSNIMNFFKKDDVRTDKNGEIIWKKDEHISNIKKVLSYPQVNIVKKVEEQTGGFSKESILPKGNSDKLIPRKTKKFYWDTKKYGGFDSPIVAYSILVIADIEKGKSKKLKTVKALVGVTIMEKMTFERDPVAFLERKGYRNVQEENIIKLPKYSLFKLENGRKRLLASARELQKGNEIVLPNHLGTLLYHAKNIHKVDEPKHLDYVDKHKDEFKELLDVVSNFSKKYTLAEGNLEKIKELYAQNNGEDLKELASSFINLLTFTAIGAPATFKFFDKNIDRKRYTSTTEILNATLIHQSITGLYETRIDLSKLGGD

SEQ ID NO: 650 - protein, 1345 aa, Streptococcus mutans 1SM1
MKKPYSIGLDIGTNSVGWAVVTDDYKVPAKKMKVLGNTDKSHIKKNLLGALLFDSGNTAEDRRLKRTARRRYTRRRNRILYLQEIFSEEMGKVDDSFFHRLEDSFLVTEDKRGERHPIFGNLEEEVKYHENFPTIYHLRQYLADNPEKVDLRLVYLALAHIIKFRGHFLIEGKFDTRNNDVQRLFQEFLAVYDNTFENSSLQEQNVQVEEILTDKISKSAKKDRVLKLFPNEKSNGRFAEFLKLIVGNQADFKKHFELEEKAPLQFSKDTYEEDLEELLGKIGDDYADLFTLAKNLYDAILLSGILTADDSSTKAPLSASMIQRYNEHQMDLAQLKQFIRQKLSDKYNEVFSDVSKDGYAGYIDGKTNQEAFYKYLKGLLNKIEGSGYFLDKIEREDFLRKQRTFDNGSIPHQIHLQEMRAIIRRQAEFYPFLADNQDRIEKILTFRIPYYVGPLARGKSDFAWLSRKSADKITPWNFDEIVDKESSAEAFINRMTNYDLYLPNQKVLPKHSLLYEKFTVYNELTKVKYKTEQGKTAFFDANMKQEIFDGVFKVYRKVTKDKLMDFLEKEFDEFRIVDLTGLDKENKVFNASYGTYHDLCKILDKDFLDNSKNEKILEDIVLTLTLFEDREMIRKRLENYSDLLTKEQVKKLERRHYTGWGRLSAELIHGIRNKESRKTILDYLIDDGNSNRNFMQLINDDALSFKEEIAKAQVIGETDNLNQVVSDIAGSPAIKKGILQSLKIVDELVKIMGHQPENIVVEMARENQFTNQGRRNSQQRLKGLTDSIKEFGSQILKEHPVENSQLQNDRLFLYYLQNGRDMYTGEELDIDYLSQYDIDHIIPQAFIKDNSIDNRVLTSSKENRGKSDDVPSKDVVRKMKSYWSKLLSAKLITQRKFDNLTKAERGGLTDDDKAGFIKRQLVETRQITKHVARILDERFYTETDENNKKIRQVKIVTLKSNLVSNFRKEFELYKVREINDYHHAHDAYLNAVIGKALLGVYPQLEPEFVYGDYPHFHGHKENKATAKKFFYSNIMNFFKKDDVRTDKNGEIIWKKDEHISNIKKVLSYPQVNIVKKVEEQTGGFSKESILPKGNSDKLIPRKTKKFYWDTKKYGGFDSPIVAYSILVIADIEKGKSKKLKTVKALVGVTIMEKMTFERDPVAFLERKGYRNVQEENIIKLPKYSLFKLENGRKRLLASARELQKGNEIVLPNHLGTLLYHAKNIHKVDEPKHLDYVDKHKDEFKELLDVVSNFSKKYTLAEGNLEKIKELYAQNNGEDLKELASSFINLLTFTAIGAPATFKFFDKNIDRKRYTSTTEILNATLIHQSITGLYETRIDLSKLGGD

SEQ ID NO: 651 - protein, 1355 aa, Streptococcus mutans NMT4863
MKKPYSIGLDIGTNSVGWAVVTDDYKVPAKKMKVLGNTDKSHIKKNLLGALLFDSGNTAEDRRLKRTARRRYTRRRNRILYLQEIFAEEMSKVDDSFFHRLDESFLTDDDKNFDSHPIFGNKAEEDAYHQKFPTIYHLRKHLADSTEKADLRLVYLALAHMIKFRGHFLIEGELNAENTDVQKLFADFVGVYDRTFDDSHLSEITVDASSILTEKISKSRRLEKLINNYPKEKKNTLFGNLIALSLGLQPNFKTNFKLSEDAKLQFSKDTYEEDLEELLGKIGDDYADLFTLAKNLYDAILLSGILTADDSSTKAPLSASMIKRYAEHHEDLEKLKEFIKANKPELYHDIFKDETKNGYAGYIENGVKQDEFYKYLKNTLSKITGSDYFLDQIEREDFLRKQRTFDNGSIPHQIHLQEMHAILRRQGDYYPFLKENQDRIEKILTFRIPYYVGPLARKNSRFAWAEYHSDEAVTPWNFDQVIDKESSAQAFIEHMTNNDLYLPNEKVLPKHSPLYEKYTVYNELTKIKYVTEIGEAKFFDANLKQEIFDGLFKHERKVTKKKLRTFLDKNFDEFRIVDIQGLDKETETFNASYATYQDLLKVIKDKVFMDNPENAEILENIVLTLTLFEDREMIKQRLAKYADVFDKKVIDQLARRHYTGWGRLSAKLLNGIRDKQSCKTIMDYLIDDAQSNRNLMQLITDDNLTFKDDIVKAQYVDNSDDLHQVVQSLAGSPAIKKGILQSLKIVDELVKVMGKEPEQIVVEMARENQTTAKGRRNSQQRYKRLKEAIKSLDRDLNHKILKEHPTDNQALQNNRLFLYYLQNGRDMYTGESLDINRLSDYDIDHVIPQAFIKDNSIDNRVLTSSKANRGKSDDVPSEDVVNRMRPFWNKLLSSGLISQRKYNNLTKKELTLDDKAGFIKRQLVETRQITKHVARMLDERFNKEFDDNNKRIRRVKIVTLKSNLVSSFRKEFELYKVREINDYHHAHDAYLNAVVVKALLVKYPKLEPEFVYGEYPKYNSYRERKTATQKMFFYSNIMNMFKSKVKLADDQIVERPMIEVNDETGEIAWDKTKHITTVKKVLSYPQVNIVKKVEEQTIGQNGGLFDDNPKSPLEVIPSKLVPLKKALNPEKYGGYQKPTTAYPILLIVDTKQLIPISVMDKKRFEQNPVKFLKDKGYQQIEKNNFVKLPKYTLVDIGNGIKRLWASSKEVHKGNQLVVSKKSQDLLYHAHHLDNDYSNEYVKNHYQQFDILFNEITSFSKKCKLGKEHIQKIEEAYSKERDFASIEELADGFIKLLGFTQLGATSPFSFLGIKLNQKQYTGKKDYLLPCMEATLIHQSITGLYETRIDLSKLGGD

SEQ ID NO: 652 - protein, 1337 aa, Streptococcus parauberis KRS-02109
MKVLGNTDRQTVKKNMIGTLLFDSGETAEARRLKRTARRRYTRRINRIKYLQSIFDDEMSKIDSAFFQRIKDSFLVPDDKNDDRHPIFGNIKDEVDYHKNYPTIYHLRKKLADSDEKADLRLIYLALAHIIKFRGHFLIEGDLDSQNTDVNALFLKLVDTYNLMFEDDKIDTQTIDATVILTEKMSKSRRLENLIAKIPNQKKNTLFGNLISLSLGLTPNFKANFELSEDAKLQISKESFEEDLDNLLAQIGDQYADLFIAAKNLSDAILLSDILTVKGVNTKAPLSASMVQRFNEHQDDLKLLKKLVKVQLPEKYKEIFDIKDKNGYAGYINGKTSQEDFYKYIKPILSKLKGAESLISKLEREDFLRKQRTFDNGSIPHQIHLNELKSIIRRQEKYYPFLKDKQVRIEKIFTFRIPYFVGPLANGNSSFAWVKRRSNESITPWNFEEVVEQEASAKVFIERMTNFDTYLPEEKVLPKHSLLYEMFTVYNELTKVKYQAEGMRKPEFLSSEEKIEIVSNLFKTERKVTVKQLKENYFNKIRCLDSITISGVEDKFNASLGTYHDLLNIIKNQKILDDEQNQDSLEDIVLTLTLFEDEKMIAKRLSKYESIFDPSILKKLKKRHYTGWGRLSQKLINGIRDKQTGKTILDFLIEDGQANRNFMQLINDPSLDFASIIKEAQEKTIKSEKLEETIANLAGSPAIKKGILQSVKIVDEVVKVMGYEPSNIVIEMARENQSTQRGINNSRERLRKLEEVHKNIGSKILKEHEISNAQLQSDRVYLYLLQDGKDMYTGKDLDFDRLSQYDIDHIIPQSFIKDNSIDNIVLTSQESNRGKSDNVPYIAIVNKMKSYWQHQLKSGAISQRKFDNLTKAERGGLSEYDKAGFIKRQLVETRQITKHVAQILNNRFNNNVDDSSKNKRPVKIITLKSKMVSDFRKEFGFYKIREVNDYHHAHDAYLNAVVGTALLKKYPKLEAEFVYGDYKHYDLASLVVKSDTSLGKATAKMFFYSNIMNFFKKEVRLADGTVITRPQIETNTETGEIVWDKVKDIKTIRKVLSIPQINVVKKTEVQTGGFSKESILSKRDSDKLIPRKNNWDPKKYGGFGSPIIAYSVLVVAKVTKGKSQKTKSVKELVGITIMEQNEFEKDRITFLEKKGYQDIQESLIIKLPKFSLFELENGRKRLLASAKELQKGNELSLPNKYIQFLYLASRYTSFSGKEEDREKHRHFVESHLHYFDEIKDIIADFSRRYILADANLEKILTLYNEKNQFSIEEQATNMLNLFTFTGLGAPATLKFFNVDIDRKRYTSSTEILNSTLIRQSITGLYETRIDLSKIGGD

SEQ ID NO: 653 - protein, 1370 aa, Streptococcus agalactiae FSL S3-026
MNKPYSIGLDIGTNSVGWSIITDDYKVPAKKMRVLGNTDKEYIKKNLIGALLFDGGNTAADRRLKRTARRRYTRRRNRILYLQEIFAEEMSKVDDSFFHRLEDSFLVEEDKRGSKYPIFATMQEEKYYHEKFPTIYHLRKELADKKEKADLRLIYLALAHIIKFRGHFLIEDDRFDVRNTDIQKQYQAFLEIFDTTFENNDLLSQNVDVEAILTDKISKSAKKDRILARYPNQKSTGIFAEFLKLIVGNQADFKKHFNLEDKTPLQFAKDSYDEDLENLLGQIGDEFADLFSAAKKLYDSVLLSGILTVTDLSTKAPLSASMIQRYDEHREDLKQLKQFVKASLPEKYQEIFADSSKDGYAGYIEGKTNQEAFYKYLSKLLTKQEGSEYLLEKIKNEDFLRKQRTFDNGSIPHQVHLTELRAIIRRQSEYYPFLKENLDRIEKILTFRIPYYVGPLAREKSDFAWMTRKTDDSIRPWNFEDLVDKEKSAEAFIHRMTNNDLYLPEEKVLPKHSLIYEKFTVYNELTKVRFLAEGFKDFQFLNRKQKETIFNSLFKEKRKVTEKDIISFLNKVDGYEGIAIKGIEKQFNASLSTYHDLKKILGKDFLDNTDNELILEDIVQTLTLFEDREMIRKRLDIYKDFFTESQLKKLYRRHYTGWGRLSAKLINGIRNKENQKTILDYLIDDGSANRNFMQLIKDAGLSFKPIIDKARTGSHSDNLKEVVGELAGSPAIKKGILQSLKIVDELVKVMGYEPEQIVVEMARENQTTAKGLSRLRQRLTTLRESLANLKSNILEEKKPKYVKDQVENHHLSDDRLFLYYLQNGKDMYTDDELDIDNLSQYDIDHIIPQAFIKDDSIDNRVLVSSAKNRGKSDDVPSVEIVKDCKVFWKKLLDAKLMSQRKYDNLTKAERGGLTSDDKARFIQRQLVETRQITKHVARILDERFNNELDSKGRRIRKVKIVTLKSNLVSNFRKEFGFYKIREVNNYHHAHDAYLNAVVAKAILTKYPQLEPEFVYGDYPKYNSYKTRKSATEKLFFYSNIMNFFKTKVTLADGTVVVKDDIEVNNDTGEIVWDKKKHFATVRKVLSYPQVNIVKKTEIQTGGFSKESILAHGNSDKLIPRKTKDIYLDPKKYGGFDSPIVAYSVLVVADIKKGKAQKLKTVTELLGITIMERSRFEKNPSAFLESKGYLNIRDDKLMILPKYSLFELENGRRRLLASADELQKGNELALPTQFMKFLYLASRYNELKGKPEEIEQKQEFVVQHVSYFDDILQIINDFSNRVILADANLEKINKLYQDNKENIPVDELANNIINLFTFTSLGAPAAFKFFDKIVDRKRYTSTKEVLNSTLIHQSITGLYETRIDLGKLGED

SEQ ID NO: 654 - protein, 1345 aa, Streptococcus mutans 5SM3
MKKPYSIGLDIGTNSVGWAVVTDDYKVPAKKMKVLGNTDKSHIEKNLLGALLFDSGNTAEDRRLKRTARRRYTRRRNRILYLQEIFSEEMGKVDDSFFHRLEDFFLVTEDKRGERHPIFGNLEEEVKYHENFPTIYHLRQYLADNPEKVDLRLVYLALAHIIKFRGHFLIEGKFDTRNNDVQRLFQEFLAVYDNTFENSSLQEQNVQVEEILTDKISKSAKKDRVLKLFPNEKSNGRFAEFLKLIVGNQADFKKHFELEEKAPLQFSKDTYEEELEVLLAQIGDNYAELFLSAKKLYDSILLSGILTADDSSTKAPLSASMIQRYNEHQMDLAQLKQFIRQKLSDKYNEVFSDVSKDGYAGYIDGKTNQEAFYKYLKGLLNKIEGSGYFLDKIEREDFLRKQRTFDNGSIPHQIHLQEMRAIIRRQSEFYPFLADNQDRIEKILTFRIPYYVGPLARGKSDFAWLSRKSADKITPWNFDEIVDKESSAEAFINRMTNYDLYLPNQKVLPKHSLLYEKFTVYNELTKVKYKTEQGETAFFDANMKQEIFDGVFKVYRKVTKDKLMDFLEKEFDEFRIVDLTGLDKENKAFNASYGTYHDLRKILDKDFLDNSKNEKILEDIVLTLTLFEDREMIRKRLKNYSDLLTKEQLKKLERRHYTGWGRLSAELIHGIRNKESRKTILDYLIDDGNSNRNFMQLINDDALSFKEEIAKAQVIGETDNLNQVVSDIAGSPAIKKGILQSLKIVDELVKIMGHQPENIVVEMARENQFTNQGRRNSQQRLKGLTDSIKEFGSQILKEHPVENSQLQNDRLFLYYLQNGRDMYTGEELDIDYLSQYDIDHIIPQAFIKDNSIDNRVLTSSKENRGKSDDVPSKDVVRKMKPYWSKLLSAKLITQRKFDNLTKAERGGLTDDDKAGFIKRQLVETRQITKHVARILDERFNTETDENNKKIRQVKIVTLKSNLVSNFRKEFELYKVREINDYHHAHDAYLNAVIGKALLGVYPQLEPEFVYGDYPHFHGHEENKATAKKFFYSNIMNFFKKDDVRTDKNGEIIWKKDEHISNIKKVLSYPQVNIVKKVEEQTGGFSKESILPKGNSDKLIPRKTKKFYWDTKKYGGFDSPIVAYSILVIADIEKGKSKKLKTVKALVGVTIMEKMTFERDPVAFLERKGYRNVQEENIIKLPKYSLFKLENGRKRLLASARELQKGNEIVLPNHLGTLLYHAKNIHKVDEPKHLDYVDKHKDEFKELLDVVSNFSKKYTLAEGNLEKIKELYAQNNGEDLKELASSFINLLTFTAIGAPATFKFFDKNIDRKRYTSTTEILNATLIHQSITGLYETRIDLSKLGGD

SEQ ID NO: 655 - protein, 1345 aa, Streptococcus mutans NFSM2; identical to SEQ ID NO: 612

SEQ ID NO: 656 - protein, 1370 aa, Streptococcus agalactiae SS1014; identical to SEQ ID NO: 575

SEQ ID NO: 657 - protein, 1370 aa, Streptococcus agalactiae STIR-CD-17; identical to SEQ ID NO: 580

SEQ ID NO: 658 - protein, 1373 aa, Streptococcus bovis ATCC 700338
MTKKNYSIGLDIGTNSVGWAVITDDYKVPAKKMKVLGNTDKKYIKKNLLGALLFDSGETAEATRLKRTARRRYTRRKNRLRYLQEIFAEEMTKVDESFFQRLDESFLRWDDDNKKLGRYPIFGNKADVVKYHQEFPTIYHLRKHLADSSEKADLRLVYLALAHMIKFRGHFLIEGELNAENTDVQKIFADFVGVYDRTFDDSHLSEITVDAASILTEKISKSRRLENLIKYYPTEKKNTLFGNLIALALGLQPNFKMNFKLSEDAKLQFSKDSYEEDLGELLGKIGDDYADLFTSAKNLYDAILLSGILIVDDNSTKAPLSASMIKRYVEHQEDLEKLKEFIKANKSELYHDIFKDKNKNGYAGYIENGVKQDEFYKYLKNTLSKIAGSDYFLDKIEREDFLRKQRTFDNGSIPHQIHLQEMHAILRRQGDYYPFLKENQDRIEKILTFRIPYYVGPLARKDSRFSWAEYHSDEKITPWNFDKVIDKEKSAEKFITRMTLNDLYLPEEKVLPKHSHVYETYAVYNELTKIKYVNEQGKDSFFDSNMKQEIFDHVFKENRKVTKEKLLNYLNKEFPEYRIKDLIGLDKENKSFNASLGTYHDLKKILDKAFLDDKVNEEVIEDIIKTLTLFEDKDMIHERLQKYSDIFTADQLKKLERRHYTGWGRLSYKLINGIRNKENNKTILDYLIDDGSANRNFMQLINDDTLPFKQIIQKSQVVGDVDDIEAVVHDLPGSPAIKKGILQSVKIVDELVKVMGDNPDNIVIEMARENQTTNRGRSQSQQRLKKLQNSLKELGSNILNEEKPSYIEDKVENSHLQNDQLFLYYIQNGKDMYTGDELDIDHLSDYDIDHIIPQAFIKDDSIDNRVLTSSAKNRGKSDDVPSLDIVRARKAEWVRLYKSGLISKRKFDNLTKAERGGLTEADKAGFIKRQLVETRQITKHVAQILDARFNTESDENDKVIRDVKVITLKSNLVSQFRKDFEFYKVREINDYHHAHDAYLNAVVGTALLKKYPKLASEFVYGEYKKYDIRKFITNSSDKATAKYFFYSNLMNFFKRVIRYSNGKVIVRPVVEYSKDTEDIAWDKKSNFRTICKVLSYPQVNIVKKVETQTGGFSKESILPKGDSDKLIPRKTKKAYWDTKKYGGFDSPTVAYSVFVVADVEKGKAKKLKTVKELVGISIMERSFFEENPVEFLENKGYHNIREDKLIKLPKYSLFEFEGGKRRLLASASELQKGNEMVIPGHLVKLLYHAQRINSFNSTKYLDYVSAHKKEFEKVLSCVEDFANLYVDVEKNLSKIRAVADSMDNFSIEEISNSFINLLTLTALGAPADFNFLGEKIPRKRYTSTKECLNATLIHQSITGLYETRIDLSKIGEE

SEQ ID NO: 659 - protein, 1345 aa, Streptococcus mutans 3SN1; identical to SEQ ID NO: 609

SEQ ID NO: 660 - protein, 1326 aa, Streptococcus pseudoporcinus SPIN 20026
MLGTVLFDSGETAQARRLKRTNRRRYTRRRYRLCQLQNIFATEMVKVDDTFFQRLSESFFYYQDKAFDKHPIFGNSKEERAYHKTYPTIYHLRKDLADRDQKADLRLIYLALSHIIKFRGHFLIEGKLNSENTDVQKLFIALVTVYNLLFEEEPIAGETCDAKALLTAKTSKSKRLESLISEFPGQKKNGLFGNLLALALGLRPNFKSNFGLSEDAKLQITKDTYEEELDNLLAEIGDHYADLFLAAKNLSDAILLSDILTLSDENTRAPLSASMIKRYEEHQEDLALLKKLVKEQMPEKYWEIFSNAKKNGYAGYIEGKVSQEDFYRYIKPILSRLKGGDEFLAKIDRDDFLRKQRTFDNGSIPHQIHLKELHAILRRQEKYYPFLAEQKEKIEQLLCFRIPYYVGPLAKGGNSSFAWLKRRSDEPITPWNFKDVVDEEASAQAFIEGMTNYDTYLPEEKVLPKHSPLYEMFTVYNELTKVKYIAENMTKPLYLSAEQKEAIIDHLFKQTRKVTVKDLKEKYFSQIEGLENVDVTGVEGAFNASLGTYNDLLKIIKDKAFLDDEANAEILEEIVLILTLFQDEKLIEKRLAKYANLFEKSVLKKLRKRHYRGWGRLSRQLIDGMKDKASGKTILDFLKADDFANRNFIQLINDSSLDFEKLIDDAQKKAIKRESLTEAVANLAGSPAIKKGILQSLKVVDEIVKVMGHNPDNIVIEMSRENQTTAQGLKNARQRLKKIKEVHKKTGSRILEDNSERITNLTLQDNRLYLYLLQDGKDMYTGQDLDINNLSQYDIDHIIPQSFIKDNSIDNLVLTTQKANRGKSDNVPSIEVVRDMKDRVWRRQLANGAISRQKFDHLTKAERGGLADSDKARFLRRQLVETRQITKHVAQLLDSRFNSKSNQNKKLARNVKIITLKSKIVSDFRKDFGLYKLREVNNYHHAHDAYLNAVVGTALLKKYPKLEAEFVYGDYKHFDLVKLISKSDPSLGKATAKVFFYSNIMNFFKEELSLADGTLMKRPVIETNTETGEVVWDKVKDFKTIRKVLSYPQVNIVKKTEIQSGAFSKESVLSKGNSDKLIERKKGWDPKKYGGFDSPNTAYSIFVVAKVAKRKAQKLKTVKEIVGITIMEQAEYEKDNIAFLEKKGYQDIQEKLLIKLPKYSLFELENGRRRLLASANEFQKGNELALSGKYMKFLYLASRYDKLSSKIESEQQKKLFVEQHLHYFDEILDIVVKHATCYIKAENNLKKIISLYKKKEAYSINEQALNMLNLFIFTSLGAPSTFVFFDETIDRKRYTTSSDVLNGILIQQSITGLYETRIDLSRFGGD

SEQ ID NO: 661 - protein, 1345 aa, Streptococcus mutans R221
MKKPYSIGLDIGTNSVGWAVVTDDYKVPAKKMKVLGNTDKSHIKKNLLGALLFDSGNTAEDRRLKRTARRRYTRRRNRILYLQEIFSEEMGKVDDSFFHRLEDSFLVTEDKRGERHPIFGNLEEEVKYHENFPTIYHLRQYLADNPEKTDLRLVYLALAHIIKFRGHFLIEGKFDTRNNDVQRLFQEFLAVYDNTFENSSLQEQNVQVEEILTDKISKSAKKDRVLKLFPNEKSNGRFAEFLKLIVGNQADFKKHFELEEKAPLQFSKDIYEEELEVLLAQIGDNYAELFLSAKKLYDSILLSGILTVTDVSTKAPLSASMIQRYNEHQMDLAQLKQFIRQKLSDKYNEVFSDVSKDGYAGYIDGKTNQEAFYKYLKGLLNKIEGSGYFLDKIEREDFLRKQRTFDNGSIPHQIHLQEMRAIIRRQAEFYPFLADNQDRIEKILTFRIPYYVGPLARGKSDFAWLSRKSADKITPWNFDEIVDKESSVEAFINRMTNYDLYLPNQKVLPKHSLLYEKFTVYNELTKVKYKTEQGKTAFFDANMKQEIFDGVFKVYRKVTKDKLMDFLEKEFDEFRIVDLTGLDKENKAFNASYGTYHDLRKILDKDFLDNSKNEKILEDIVLTLTLFEDREMIRKRLKNYSDLLTKEQLKKLERRHYTGWGRLSAELIHGIRNKESRKTILDYLIDDGNSNRNFMQLINDDALSFKEEIAKAQVIGETDNLNQVVSDIAGSPAIKKGILQSLKIVDELVKIMGHQPENIVVEMARENQFTNQGRRNSQQRLKGLTDSIKEFGSQILKEHPVENSQLQNDRLFLYYLQNGRDMYTGEELDIDYLSQYDIDHIIPQAFIKDNSIDNRVLTSSKENRGKSDDVPSKDVVRKMKSYWSKLLSAKLITQRKFDNLTKAERGGLTDDDKAGFIKRQLVETRQITKHVARILDERFNTETDENNKKIRQVKIVTLKSNLVSNFRKEFELYKVREINDYHHAHDAYLNAVIGKALLGVYPQLEPEFVYGDYPHFHGHKENKATAKKFFYSNIMNFFKKDDVRTDKNGEIIWKKDEHISNIKKVLSYPQVNIVKKVEEQTGGFSKESILPKGNSDKLIPRKTKKFYWDTKKYGGFDSPIVAYSILVIADIEKGKSKKLKTVKALVGVTIMEKMTFERDPVAFLERKGYRNVQEENIIKLPKYSLFKLENGRKRLLASARELQKGNEIVLPNHLGTLLYHAKNIHKVDEPKHLDYVDKHKDEFKELLDVVSNFSKKYTLAEGNLEKIKELYAQNNGEDLKELASSFINLLTFTAIGAPATFKFFDKNIDRKRYTSTTEILNATLIHQSITGLYETRIDLNKLGGD

SEQ ID NO: 662 - protein, 1345 aa, Streptococcus mutans N3209
MKKPYSIGLDIGTNSVGWAVVTDDYKVPAKKMKVLGNTDKSHIKKNLLGALLFDSGNTAEDRRLKRTTRRRYTRRRNRILYLQEIFSEEMGKVDDSFFHRLEDSFLVTEDKRGERHPIFGNLEEEVKYHENFPTIYHLRQYLADNPEKTDLRLVYLALAHIIKFRGHFLIEGKFDTRNNDVQRLFQEFLAVYDNTFENSSLQEQNVQVEEILTDKISKSAKKDRVLKLFPNEKSNGCFAEFLKLIVGNQADFKKHFELEEKAPLQFSKDTYEEELEVLLAQIGDNYAELFLSAKKLYDSILLSGILTVTDVSTKAPLSASMIQRYNEHQMDLTQLKQFIRQKLSDKYNEVFSDVSKDGYAGYIDGKTNQEAFYKYLKGLLNKIEGSGYFLDKIEREDFLRKQRTFDNGSIPHQIHLQEMRAIIRRQAEFYPFLADNQDRIEKLLTFRIPYYVGPLASGKSDFAWLSRKSADKITPWNFDEIVDKESSAEAFINRMTNYDLYLPNQKVLPKHSLLYEKFTVYNELTKVKYKTEQGKTAFFDANMKQEIFDGVFKVYRKVTKDKLMDFLEKEFDEFRIVDLTGLDKENKVFNASYGTYHDLCKILDKDFLDNSKNEKILEDIVLTLTLFEDREMIRKRLENYSDLLTKEQVKKLERRHYTGWGRLSAELIHGIRNKESRKTILDYLIDDGNSNRNFMQLINDDALSFKEEIAKAQVIGETDNLNQVVSDIAGSPAIKKGILQSLKIVDELVKIMGHQPENIVVEMARENQFTNQGRRNSQQRLKGLTDSIKEFGSQILKEHPVENSQLQNDRLFLYYLQNGRDMYTGEELDIDYLSQYDIDHIIPQAFIKDNSIDNRVLTSSKENRGKSDDVPSKDVVRKMKSYWSKLLSAKLITQRKFDNLTKAERGGLTDDDKAGFIKRQLVETRQITKHVARILDERFNTETDENNKKIRQVKIVTLKSNLVSNFRKEFELYKVREINDYHHAHDAYLNAVIGKALLGVYPQLEPEFVYGDYPHFHGHKENKATAKKFFYSNIMNFFKKDDVRTDKNGEIIWKKDEHISNIKKVLSYPQVNIVKKVEEQTGGFSKESILPKGNSDKLIPRKTKKFYWDTKKYGGFDSPIVAYSILVIADIEKGKSKKLKTVKALVGVTIMEKMTFERDPVAFLERKGYRNVQEENIIKLPKYSLFKLENGRKRLLASARELQKGNEIVLPNHLGTLLYHAKNIHKVDEPKHLDYVDKHKDEFKELLDVVSNFSKKYTLAEGNLEKIKELYAQNNGEDLKELASSFINLLTFTAIGAPATFKFFDKNIDRKRYTSTTEILNATLIHQSITGLYETRIDLSKLGGD

SEQ ID NO: 663 - protein, 1345 aa, Streptococcus mutans NLML1; identical to SEQ ID NO: 606

SEQ ID NO: 664 - protein, 1345 aa, Streptococcus mutans N29
MKKPYSIGLDIGTNSVGWAVVTDDYKVPAKKMKVLGNTDKSHIKKNLLGALLFDSGNTAADRRLKRTARRRYTRRRNRILYLQEIFAEEMSKVDDSFFHRLEDSFLVTEDKRGERHPIFGNLEEEVKYHENFPTIYHLRQYLADNPEKVDLRLVYLALAHIIKFRGHFLIEGKFDTRNNDVQRLFQEFLAVYDNTFENSSLQEQNVQVEEILTDKISKSAKKDRVLKLFPNEKSNGRFAEFLKLIVGNQADFKKHFELEEKAPLQFSKDTYEEELEVLLAQIGDNYAELFLSAKKLYDSILLSGILTVTDVSTKAPLSASMIQRYNEHQMDLAQLKQFIRQKLSDKYNEVFSDVSKDGYAGYIDGKTNQEAFYKYLKGLLNKIEGSGYFLDKIEREDFLRKQRTFDNGSIPHQIHLQEMRAIIRRQAEFYPFLADNQDRIEKILTFRIPYYVGPLARGKSDFAWLSRKSADKITPWNFDEIVDKESSAEAFINRMTNYDLYLPNQKVLPKHSLLYEKFTVYNELTKVKYKTEQGKTAFFDANMKQEIFDGVFKVYRKVTKDKLMDFLEKEFDEFRIVDLTGLDKENKAFNASYGTYHDLRKILDKDFLDNSKNEKILEDIVLTLTLFEDREMIRKRLENYSDLLTKEQVKKLERRHYTGWGRLSAELIHGIRNKESRKTILDYLIDDGNSNRNFMQLINDDALSFKEEIAKAQVIGETDNLNQVVSDIAGSPAIKKGILQSLKIVDELVKIMGHQPENIVVEMARENQFTNQGRRNSQQRLKGLTDSIKEFGSQILKEHPVENSQLQNDRLFLYYLQNGRDMYTGEELDIDYLSQYDIDHIIPQAFIKDNSIDNRVLTSSKENRGKSDDVPSKNVVRKMKSYWSKLLSAKLITQRKFDNLTKAERGGLTDDDKAGFIKRQLVETRQITKHVARILDERFHTETDENNKKIRQVKIVTLKSNLVSNFRKEFELYKVREINDYHHAHDAYLNAVIGKALLGVYPQLEPEFVYGDYPHFHGHKENKATAKKFFYSNIMNFFKKDDVRTDKNGEIIWKKDEHISNIKKVLSYPQVNIVKKVEEQTGGFSKESILPKGNSDKLIPRKTKKFYWDTKKYGGFDSPIVAYSILVIADIEKGKSKKLKTVKALVGVTIMEKMTFERDPVAFLERKGYRNVQEENIIKLPKYSLFKLENGRKRLLASARELQKGNEIVLPNHLGTLLYHAKNIHKVDEPKHLDYVDKHKDEFKELLDVVSNFSKKYTLAEGNLEKIKELYAQNNGEDLKELSSSFINLLTFTAIGAPAAFKFFDKNIDRKRYTSTTEILNATLIHQSITGLYETRIDLSKLGGD

SEQ ID NO: 665 - protein, 1377 aa, Streptococcus equinus ATCC 9812
MEKTYSIGLDIGTNSVGWAVITDDYKVPAKKMKVLGNTDKKYIKKNLLGALLFDSGETAEATRLKRAARRRYTRRKNRLRYLQEIFAKEMAKVDESFFQRLEESFLTDDDKTFDSHPIFGNKAEEDTYHQEFPTIYHLRKHLADSPEKVDLRLVYLALAHMIKFRGHFLIEGQLNAENTDVQKIFADFVGVYDRTFDDSHLSEITVDAASILTEKISKSRRLENLIKQYPTEKKNTLFGNLVALALGLQPNFKTNFKLSEDAKLQFSKDTYDEDLEELLGKIGDDYADLFTAAKNLYDAILLSGILTVDDNSTKAPLSASMIKRYEEHHEDLEKLKTFIKVNNFDKYHEIFKDKSKNGYAGYIENGVKQDIFYKHLKSIISEKNGGQYFLDKIEREDFLRKQRTFDNGSIPYQIHLQEMRTILRRQGEYYPFLKENQAKIEKILTFRIPYYVGPLARKNSRFAWAKYHSDEPITPWNFDEVVDKEKSAEKFITRMTLNDLYLPEEKVLPKHSYVYETFAVYNELTKIKYVNEQGKSFFFDANMKQEIFDHVFKENRKVTKAKLLSYLNNEFEEFRINDLIGLDKDSKSFNASLGTYHDLKKILDKSFLDDKTNEQIIEDIVLTLTLFEDRDMIHERLQKYSDIFTSQQLKKLERRHYTGWGRLSYKLINGIRNKENNKTILDFLIDDGDANRNFMQLINDDSLSFKTTIQEAQVVGDVDDIEAVVHDLPGSPAIKKGILQSVKIVDELVKVMGHNPQNIVIEMARENQITGYGRNRSNQRLKRLQDSLKEFGSDILSKKKPSYVDSKVENSHLQNDRLFLYYIQNGKDMYTGEELDIDHLSDYDIDHIIPQAFIKDNSIDNRVLTSSAKNRGKSDDVPSIEIVRNRKSYWYKLYKSGLISKRKFDNLTKAERGGLTETDKAGFIKRQLVETRQITKHVAQILDARFNTKCDENDKVIRDVKVITLKSSLVSQFRKEFKFYKVREINDYHHAHDAYLNAVVGTALLKKYPKLAPEFVYGEYKKYDVRKLVAKSSDNHSELGKATAKYFFYSNLMNFFKTEVKYADGRVFERPDIETNADGEVVWNKQRDFNIVRKVLSYPQVNIVKKVEVQTGGFSKESILPKGDSDKLIPRKTKKLQWETQKYGGFDSPTVAYSVLVVADVEKGKTRKLKTVKELVGISIMERSSFEENPVSFLEKKGYHNVQEDKLIKLPKYSLFEFEGGRRRLLASATELQKGNEVVLPQYMVNLLYHSQHVNNSHKPEHLNYVKQHKDEFKDIFNLIISIARINILKPKVVDNLINEFTEYGQEDISSLSESFINLLKFISFGAPGAFKFLKLDVKQSNLRYKSTTEALSATLIHQSVTGLYETRIDLSKLGEE

SEQ ID NO: 666 - protein, 1345 aa, Streptococcus mutans NVAB; identical to SEQ ID NO: 581

SEQ ID NO: 667 - protein, 1373 aa, Streptococcus oralis SK304
MENKNYSIGLDIGTNSVGWAVITDDYKVPSKKMKVLGNTDKRFIKKNLIGALLFDEGTTAEARRLKRTARRRYTRRKNRLRYLQEIFAEEMSKVDSSFFHRLDDSFLIPEDKKGSKYPIFATLIEEKEYHKQFPTIYHLRKQLADSKEKTDLRLIYLALAHMIKYRGHFLYEDTFDIKNNDIQKIFNEFISIYNNTFEGNSLSGQNVQVEAIFTDKISKSAKRERVLKLFPDEKSTGLFSEFLKLIVGNQADFKKHFDLEEKAPLQFSRDTYDEDLENLLGQIGDDFADLFVAAKKLYDAILLSGILTVTDPSTKAPLSASMIERYENHQKDLATLKQFIKTNLPEKYDEVFSDQSKDGYAGYIDGKTTQESFYKYIKNLLSKFEGADYFLEKIEREDFLRKQRTFDNGSIPHQIHLQEMNAILRRQGEHYPFLKENKEKIEKILTFRIPYYVGPLARGNRDFAWLTRNSDQAIRPWNFEEIVDKASSAESFINKMTNYDLYLPEEKVLPKHSLLYETFAVYNELTKVKFIAEGLRDYQFLDSRQKKDIFYTLFKAEDKRKVTEKDIIQYLHTVDGYDGIELKGIEKQFNASLSTYHDLLKIIKDKEFMDDPNNEEILENIVHTLTIFEDREMIKQRLAQYDSLFDEKVIKALTRRHYTGWGKLSSKLINGIRDKQTGKTILDYLMDDGYNNRNFMQLINDDELSFKEIIKKAQVVGKTDDVKQVVQELPGSPAIKKGILQSIKLVDELVKVMGHEPESIVIEMARENQTTARGKKNSQQRYKRIEDSLKILASGLNAKILKEHPTDNIQLQNDRLFLYYLQNGRDMYTGKPLDINQLSSYDIDHIVPQAFIKDDSLDNRVLTSLKDNRGKSDNVPSLEVVEKMKTFWQQLLDSKLISYRKFNNLTKAERGGLDERDKVGFIKRQLVETRQITKHVAQILDARYNTEVNEKDKKNRTVKIITLKSNLVSNFRKEFRLYKIREINDYHHAHDAYLNAVVAKAILKKYPKLEPEFVYGDYQKYDLKRYISRSKDPKEIEKATEKYFFYSNLLNFFKEEVHYADGTIVKRENIEYSKDTGEIAWNKEKDFATIKKVLSLPQVNIVKKREVQTGGFSKESILPKGNSDKLIPRKTKDILWDTTKYGGFDSPVIAYSILLIADIEKGKAKRLKTVKTLVGITIMEKATFEKSPIAFLENKGYHNVRKENILCLPKYSLFELKNGRRRMLASAKELQKGNEIVLPVHLTTLLYHAKNIHRLDEPEHLEYIQKHRNEFKGLLNLVSEFSQKYVLADANLEKIKNLYADNEQADIEILANSFINLLTFTALGAPAAFKFFGKDVDRKRYTTVSEILNATLIHQSITGLYETRIDLSKLGED

SEQ ID NO: 668 - protein, 1355 aa, Streptococcus mutans 15VF2
MKKSYSIGLDIGTNSVGWAVVTDDYKVPAKKMKVLGNTDKSHIKKNLLGALLFDSGNTAEDRRLKRTARRRYTRRRNRILYLQEIFSEEMGKVDDSFFHRLDESFLTDDDKNFDSHPIFGNKAEEDAYHQKFPTIYHLRKHLADSTEKADLRLVYLALAHMIKFRGHFLIEGELNAENTDVQKLFADFVGVYDRTFDDSHLSEITVDASSILTEKISKSRRLEKLINNYPKEKKNTLFGNLIALSLGLQPNFKTNFKLSEDAKLQFSKDTYEEDLEELLGKIGDDYADLFTLAKNLYDAILLSGILTADDSSTKAPLSASMIKRYAEHHEDLEKLKEFIKANKPELYHDIFKDETKNGYAGYIENGVKQDEFYKYLKNTLSKIAGSDYFLDKIEREDFLRKQRTFDNGSIPHQIHLQEMHAILRRQGDYYPFLKENQDRIEKILTFRIPYYVGPLARKNSRFAWAEYHSDEAVMPWNFDQVIDKESSAQAFIEHMTNNDLYLPNEKVLPKHSPLYEKYTVYNELTKIKYVTEIGEAKFFDANLKQEIFDGLFKHERKVTKKKLRTFLDKNFDEFRIVDIQGLDKETETFNASYATYQDLLKVIKDKVFMDNPENAEILENIVLTLTLFEDREMIKQRLAKYADVFDKKVIDQLARRHYTGWGRLSAKLLNGIRDKQSCKTIMDYLIDDAQSNRNLMQLITDDNLTFKDDIVKAQYVDNSDDLHQVVQSLAGSPAIKKGILQSLKIVDELVKVMGKEPEQIVVEMARENQTTAKGRRNSQQRYKRLKEAIKSLDRDLNHKILKEHPTDNQALQNNRLFLYYLQNGRDMYTGESLDINRLSDYDIDHVIPQAFIKDNSIDNRVLTSSKANRGKSDDVPSEDVVNRMRPFWNKLLSSGLISQRKYNNLTKKELTPDDKAGFIKRQLVETRQITKHVARMLDERFNKEFDDNNKRIRRVKIVTLKSNLVSSFRKEFELYKVREINDYHHAHDAYLNAVVVKALLVKYPKLEPEFVYGEYPKYNSYRERKTATQKMFFYSNIMNMFKSKVKLADDQIVERPMIEVNDETGEIAWDKTKHITTVKKVLSYPQVNIVKKVEEQTIGQNGGLFDDNPKSPLEVIPSKLVPLKKALNPEKYGGYQKPTTAYPILLIVDTKQLIPISVMDKKRFEQNPVKFLKDKGYQQIEKNNFVKLPKYTLVDIGNGIKRLWASSKEVHKGNQLVVSKKSQDLLYHAHHLDNDYSNEYVKNHYQQFDILFNEITSFSKKCKLGKEHIQKIEEAYSKERDSASIEELADGFIKLLGFTQLGATSPFSFLGIKLNQKQYTGKKDYLLPCMEATLIHQSITGLYETRIDLNKLGGD

SEQ ID NO: 669 - protein, 773 aa, Streptococcus agalactiae 18RS21
MNKPYSIGLDIGTNSVGWSIITDDYKVPAKKMRVLGNTDKEYIKKNLIGALLFDGGNTAADRRLKRTARRRYTRRRNRILYLQEIFAEEMSKVDDSFFHRLEDSFLVEEDKRGSKYPIFATLQEEKDYHEKFSTIYHLRKELADKKEKADLRLIYIALAHIIKFRGHFLIEDDSFDVRNTDISKQYQDFLEIFNTTFENNDLLSQNVDVEAILTDKISKSAKKDRILAQYPNQKSTGIFAEFLKLIVGNQADFKKYFNLEDKTPLQFAKDSYDEDLENLLGQIGDEFADLFSAAKKLYDSVLLSGILTVIDLSTKAPLSASMIQRYDEHREDLKQLKQFVKASLPEKYQEIFADSSKDGYAGYIEGKTNQEAFYKYLSKLLTKQEDSENFLEKIKNEDFLRKQRTFDNGSIPHQVHLTELKAIIRRQSEYYPFLKENQDRIEKILTFRIPYYIGPLAREKSDFAWMTRKTDDSIRPWNFEDLVDKEKSAEAFIHRMTNNDFYLPEEKVLPKHSLIYEKFTVYNELTKVRYKNEQGETYFFDSNIKQEIFDGVFKEHRKVSKKKLLDFLAKEYEEFRIVDVIGLDKENKAFNASLGTYHDLEKILDKDFLDNPDNESILEDIVQTLTLFEDREMIKKRLENYKDLFTESQLKKLYRRHYTGWGRLSAKLINGIRDKESQKTILDYLIDDGRSNRNFMQLINDDGLSFKSIISKAQAGSHSDNLKEVVGELAGSPAIKKGILQSLKIVDELVKVMGYEPEQIVVEMARENQTTNQ

SEQ ID NO: 670 - protein, 1345 aa, Streptococcus mutans SF14
MKKPYSIGLDIGTNSVGWAVVTDDYKVPAKKMKVLGNTDKSHIKKNLLGALLFDSGNTAEDRRLKRTARRRYTRRRNRILYLQEIFSEEMGKVNDSFFHRLEDSFLVTEDKRGERHPIFGNLEEEVKYHENFPTIYHLRQYLADNPEKVDLRLVYLALAHIIKFRGHFLIEGKFDTRNNDVQRLFQEFLAVYDNTFENSSLQEQNVQVEEILTDKISKSAKKDRVLKLFPNEKSNGRFAEFLKLIVGNQADFKKHFELEEKAPLQFSKDTYEEELEVLLAQIGDNYAELFLSAKKLYDSILLSGILTVTDVSTKAPLSASMIQRYNEHQMDLAQLKQFIRQKLSDKYNEVFSDVSKDGYAGYIDGKTNQEAFYKYLKGLLNKIEGSGYFLDKIEREDFLRKQRTFDNGSIPHQIHLQEMRAIIRRQAEFYPFLADNQDRIEKILTFRIPYYVGPLARGKSDFAWLSRKSADKITPWNFDEIVDKESSAEAFINRMTNYDLYLPNQKVLPKHSLLYEKFTVYNELTKVKYKTEQGKTAFFDANMKQEIFDGVFKVYRKVTKDKLMDFLEKEFDEFRIVDLTGLDKENKVFNASYGTYHDLCKILDKDFLDNSKNEKILEDIVLTLTLFEDREMIRKRLENYSDLLTKEQVKKLERRHYTGWGRLSAELIHGIRNKESRKTILDYLIDDGNSNRNFMQLINDDALSFKEEIAKAQVIGETDNLNQVVSDIAGSPAIKKGILQSLKIVDELVKIMGHQPENIVVEMARENQFTKQGRRNSQQRLKGLTDSIKEFGSQILKEHPVENSQLQNDRLFLYYLQNGRDMYTGEELDIDYLSQYDIDHIIPQAFIKDNSIDNRVLTSSKENRGKSDDVPSKDVVRKMKSYWSKLLSAKLITQRKFDNLTKAERGGLTDDDKAGFIKRQLVETRQITKHVARILDERFYTETDENNKKIRQVKIVTLKSNLVSNFRKEFELYKVREINDYHHAHDAYLNAVIGKALLGVYPQLEPEFVYGDYPHFHGHKENKATAKKFFYSNIMNFFKKDDVRTDKNGEIIWKKDEYISNIKKVLSYPQVNIVKKVEEQTGGFSKESILPKGNSDKLIPRKTKKFYWDTKKYGGFDSPIVAYSILVIADIEKGKSKKLKTVKALVGVTIMEKMTFERDPIAFLERKGYRNVQEENIIKLPKYSLFKLENGRKRLLASARELQKGNEIVLPNHLGTLLYHAKNIHKVDEPKHLDYVDKHKDEFKELLDVVSNFSKKYTLAEGNLEKIKELYAQNNGEDLKELASSFINLLTFTAIGAPAAFKFFDKNIDRKRYTSTTEILNATLIHQSITGLYETRIDLSKLGGD

SEQ ID NO: 671 - protein, 1345 aa, Streptococcus anginosus F0211
MDQKYSIGLDIGTNSVGWAVVTDDYKVPAKKMKVLGNTDKQSIKKNLLGALLFDSGETAEATRLKRTARRRYTRRRNRLRYLQEIFAEEMNKVDENFFQRLDDSFLVDEDKRGERHPIFGNIAAEVKYHDDFPTIYHLRKHLADISQKADLRLVYLALAHMIKFRGHFLIEGQLKAENTNVQALFKDFVEVYDKTVEESHLSEMTVDALSILTEKVSKSRRLENLIAHYPAEKKNTLFGNLIALSLGLQPNFKTNFQLSEDAKLQFSKDTYEEDLEGLLGEIGDEYADLFASAKNLYDAILLSGILTVDDNSTKAPLSASMVKRYEEHQKDLKKLKDFIKVNAPDQYNAIFKDKNKKGYAGYIENGVKQDEFYKYLKGILLQINGSGDFLDKIDREDFLRKQRTFDNGSIPHQIHLQEMHAILRRQEEHYPFLKENQDKIEKILTFRIPYYVGPLARKGSRFAWAEYKADEKITPWNFDDILDKEKSAEKFITRMTLNDLYLPEEKVLPKHSLLYETFTVYNELTKVKYVNEQGEAKFFDANMKQEIFDHVFKENRKVTKDKLLNYLNKEFEEFRIVNLTGLDKENKAFNSSLGTYHDLRKILDKSFLDDKANEKTIEDIIQTLTLFEDREMIRQRLQKYSDIFTKAQLKKLERRHYTGWGRLSYKLINGIRNKENKKTILDYLIDDGYANRNFMQLINDDALSFKEEIARAQIIGDVDDIANVVHDLPGSPAIKKGILQSVKIVDELVKVMGHNPANIIIEMARENQMTDKGRRNSQQRLKLLQDSLKNLDNPVNIKNVENQQLQNDRLFLYYIQNGKDMYTGETLDINNLSQYDIDHIIPQAFIKDNSLDNRVLTRSDKNRGKSDDVPSIEVVHEMKSFWSKLLSVKLITQRKFDNLTKAERGGLTEEDKAGFIKRQLVETRQITKHVAQILDERFNTEFDGNKRRIRNVKIITLKSNLVSNFRKEFELYKVREINDYHHAHDAYLNAVVGNALLLKYPQLEPEFVYGEYPKYNSYRSRKSATEKFLFYSNILRFFKKEDIQTNEDGEIAWNKEKHIKILRKVLSYPQVNIVKKTEEQTGGFSKESILPKGESDKLIPRKTKNSYWNPKKYGGFDSPVVAYSILVFADVEKGKSKKLRKVQDMVGITIMEKKRFEKHPVDFLEQRGYRNVRLEKIIKLPKYSLFELENKRRRLLASARELQKGNELVIPQRFTTLLYHSYQIEKNYEPEHREYVEKHKDEFKELLEYISVFSRKYVLADNNLTKIEMLFSKNKDAEVSSLAKSFISLLTFTAFGAPAAFNFFGENIDRKRYTSVTECLNATLIHQSITGLYETRIDLSKLGED

SEQ ID NO: 672 - protein, 1338 aa, Streptococcus macacae NCTC 11558
MTKPYSIGLDIGTNSVGWAVVTDGYKVPAKKMKVLGNTDKSHIKKNLLGALLFDSGNTAKDRRLKRTARRRYTRRRNRILYLQEIFAEEMAKADESFFQRLNESFLTNDDKEFDSHPIFGNKAEEEAHHHKFPTIFHLRKHLADSTEKSDLRLIYLALAHMIKFRGHFLIEGQLKAENTNVQTLFDDFVEVYDKTVEESHLSEISVSSILTEKISKSRRLENLIKYYPTEKKNTLFGNLIALSLGLQPNFKTNFKLSEDAKLQFSKDTYEEDLGELLGKIGDNYADLFISAKNLYDAILLSGILTIDDNTTKAPLSASMIKRYEEHQEDLAQLKKFIRQNLPDQYSEVFSDKTKDGYAGYIDGKTNQEAFYKYIKNMLSKTEGADYFLDKIDREDFLRKQRTFDNGSVPHQIHLQEMHAILRRQGEYYPFLKENQDKIEKILTFRIPYYVGPLARKGSRFAWAEYKADKKVTPWNFDDILDKEKSAEEFITRMTLNDLYLPEEKVLPKHSLVYETFNVYNELTKVKYVNEQGKAIFFDANMKQEIFDHVFKENRKVTKDKLLNYLNKEFEEFRIVNLTGLDKENKAFNSSLGTYHDLRKILDKSFLDDKVNEKIIEDIIQTLTLFEDREMIRQRLQKYSDIFTTQQLKKLERRHYTGWGRLSAKLINGIRDKQSNKTILGYLIDDGYSNRNFMQLINDDSLPFKEEIARAQVIGETDDLNQLVSDIAGSPAIKKGILQSLKIVDELVKVMGHNPANIVIEMARENQTTAKGRRSSQQRYKRLEEAIKNLDHDLNHKILKEHPTDNQALQNDRLFLYYLQNGRDMYTEDPLDINRLSDYDIDHIIPQSFIKDDSIDNKVLVSSAKNRGKSDNVPSEDVVNRMRPFWNKLLSCGLISQRKYSNLTKKELKPDDKAGFIKRQLVETRQITKHVAQILDARFNTKRDENKKVIRDVKIITLKSNLVSQFRKDFKFYKVREINDYHHAHDAYLNAVIGKALLDVYPQLEPEFVYGEYPHFHGYKENKATAKKFFYSNIMNFFKKDDIRTDENGEIVWKKDEHISNIKRVLSYPQVNIVKKVEIQTVGQNGGLFDDNPKSPLEVTPSKLVPLKKELNPKKYGGYQKPTTAYPVLLITDTKQLIPISVMNKKQFEQNPVKFLRDRGYQQVGKNDFIKLPKYTLVDIGDGIKRLWASSKEIHKGNQLVVSKKSQILLYHAHHLDSDLSNDYLQNHNQQFDVLFNEIISFSKKCKLGKEHIQKIENVYSNKKNSASIEELAESFIKLLGFTQLGATSPFNFLGVKLNQKQYKGKKDYILPCTEGTLIRQSITGLYETRVDLSKIGED

SEQ ID NO: 673 - protein, 1371 aa, Streptococcus sp. F0441
MENKNYSIGLDIGTNSVGWSVITDDYKVPSKKMKVLGNTDKHFIKKNLIGALLFDEGTTAEARRLKRTARRRYTRRKNRLRYLQEIFSEEIGKVDSSFFHRLDDSFLIPEDKRGSKYPIFATLAEEKKYHKQFPTIYHLRKQLADSKEKTDLRLIYLALAHMIKYRGHFLYEEAFDIKNNDIQKIFNEFISIYNNTFEGNSLSGQNVQVEAIFTDKISKSAKRERVLKLFPDEKSTGLFSEFLKLIVGNQADFKKHFDLEEKAPLQFSRDTYDEDLENLLGQIGDDFADLFLVAKKLYDAILLSGILTVTNPSTKAPLSASMIERYENHQKDLASLKQFIKNNLPEKYDEVFSDQSEDGYAGYIDGKTTQETFYKYIKNLLSKFEGADYFLDKIEREDFLRKQRTFDNGSIPHQIHLQEMNAILRRQGEHYPFLKENKEKIEKILTFRIPYYVGPLARGNRDFAWLTRNSDQAIRPWNFEEIVDKASSAEDFINKMTNYDLYLPEEKVLPKHSLLYETFAVYNELTKVKFIAEGLRDYQFLDSGQKKQIVTQLFKEKRKVTEKDIIQFLHNVDGYDGIELKGIEKQFNASLSTYHDLLKIIKDKAFMDDAKNEAILENIVHTLTIFEDREMIKQRLAQYDSLFDEKVIKALTRRHYTGWGKLSAKLINGISDKQTGNTILDYLIDDGEINRNFMQLINDDGLSFKEIIQKAQVVGKTNDVKQVVQELPGSPAIKKGILQSIKIVDELVKVMGHAPESIVIEMARENQTTARGKKNSQQRYKRIEDSLKILASGLNSKILKEHPTDNIQLQNDRLFLYYLQNGKDMYTGEALDINQLSSCDIDHIIPQAFIKDDSLDNRVLTSSKDNRGKSDNVPSLEVVDKMKVFWQQLLDSKLISYRKFNNLTKAERGGLNELDKVGFIKRQLVETRQITKHVAQILDARFNKEVTEKDKKNRTVKIITLKSNLVSNFRKEFELYKVREINDYHHAHDAYLNAVVAKAILKKYPKLEPEFVYGDYQKYDLKRYISRSKDPKEIEKATEKYFFYSNLLNFFKEEVHYADGTIVKRENIEYSKDTGEIAWNKEKDFATIKKVLSLPQVNIVKKREVQTGGFSKESILPKGNSDKLIPRKTKDILWDTTKYGGFDSPVIAYSILLIADIEKGKAKKLKTVKTLVGITIMEKDAFEKNPIAFLENKGYHNVCKENILCLPKYSLFELENGRRRLLASAKELQKCNEIVLPVYLTTLLYHSKNVHKLDEPGHLEYIQKHRNEFKDLLNLVSEFSQKYVLADANLEKIKNLYADNEQADIEILANSFINLLTFTALGAPAAFKFFGKDVDRKRYTTVSEILNATLIHQSITGLYETRIDLSKLGED

SEQ ID NO: 674 - protein, 1345 aa, Streptococcus mutans M230
MKKPYSIGLDIGTNSVGWAVVTDDYKVPAKKMKVLGNTDKSHIKKNLLGALLFDSGNTAEDRRLKRTARRRYTRRRNRILYLQEIFSEEMGKVDDSFFHRLEDSFLVTEDKRGERHPIFGNLEEEVKYHENFPTIYHLRQYLADNPEKVDLRLVYLALAHIIKFRGHFLIEGKFDTRNNDVQRLFQEFLAVYDNTFENSSLQEQNVQVEEILTDKISKSAKKDRVLKLFPNEKSNGRFAEFLKLIVGNQADFKKHFELEEKAPLQFSKDTYEEELEVLLAQIGDNYAELFLSAKKLYDSILLSGILTVTDVSTKAPLSASMIQRYNEHQMDLAQLKQFIRQKLSDKYNEVFSDVSKDGYAGYIDGKTNQEAFYKYLKGLLNKIEGSGYFLDKIEREDFLRKQRTFDNGSIPHQIHLQEMRAIIRRQAEFYPFLADNQDRIEKILTFRIPYYVGPLARGKSDFAWLSRKSADKITPWNFDEIVDKESSAEAFINRMTNYDLYLPNQKVLPKHSLLYEKFTVYNELTKVKYKTEQGKTAFFDANMKQEIFDGVFKVYRKVTKDKLMDFLEKEFDEFRIVDLTGLDKENKVFNASYGTYHDLCKILDKDFLDNSKNEKILEDIVLTLTLFEDREMIRKRLENYSDLLTKEQVKKLERRHYTGWGRLSAELIHGIRNKESRKTILDYLIDDGNSNRNFMQLINDDALSFKEEIAKAQVIGETDNLNQVVSDIAGSPAIKKGILQSLKIVDELVKIMGHQPENIVVEMARENQFTNQGRQNSQQRLKGLTDSIKEFGSQILKEHPVENSQLQNDRLFLYYLQNGRDMYTGEELDIDYLSQYDIDHIIPQAFIKDNSIDNRVLTSSKENRGKSDDVPSEDVVRKMKSYWSKLLSAKLITQRKFDNLTKAERGGLTDDDKAGFIKRQLVETRQITKHVARILDERFYTETDENNKKIRQVKIVTLKSNLVSNFRKEFELYKVREINDYHHAHDAYLNAVIGKALLGVYPQLEPEFVYGDYPHFHGHKENKATAKKFFYSNIMNFFKKDDVRTDKNGEIIWKKDEHISNIKKVLSYPQVNIVKKVEEQTGGFSKESILPKGNSDKLIPRKTKKFYWDTKKYGGFDSPIVAYSILVIADIEKGKSKKLKTVKALVGVTIMEKMTFERDPVAFLERKGYRNVQEENIIKLPKYSLFKLENGRKRLLASARELQKGNEIVLPNHLGTLLYHAKNIHKVDEPKHLDYVDKHKDEFKELLDVVSNFSKKYTLAEGNLEKIKELYAQNNGEDLKELASSFINLLTFTAIGAPATFKFFDKNIDRKRYTSTTEILNATLIHQSITGLYETRIDLSKLGGD

SEQ ID NO: 675 - protein, 1367 aa, Streptococcus pyogenes MGAS15252; identical to SEQ ID NO: 588

SEQ ID NO: 676 - protein, 1350 aa, Streptococcus mutans NFSM1
MKKPYSIGLDIGTNSVGWAVVTDDYKVPAKKMTVLGNTDKSHIKKNLLGALLFDSGNTAADRRLKRTARRRYTRRRNRILYLQEIFAEEMSKVDDSFFHRLEDSFLVTEDKRGERHPIFGNLEEEVKYHENFPTIYHLRQYLADNPEKVDLRLVYLALAHIIKFRGHFLIEGKFDTRNNDVQRLFQEFLAVYDNTFENSSLQEQNVQVEEILTDKISKSAKKDRVLKLFPNEKSNGRFAEFLKLIVGNQADFKKHFELEEKTPLQFSKDTYEEELEVLLAQIGDNYAELFLSAKKLYDSILLSGILTVTDVSTKAPLSASMIQRYNEHQMDLAQLKQFIRQKLSDKYNEVFSDVSKDGYAGYIDGKTNQEAFYKYLKGLLNKIEGSGYFLDKIEREDFLRKQRTFDNGSIPHQIHLQEMRAIIRRQAEFYPFLADNQDRIEKILTFRIPYYVGPLARGKSDFAWLSRKSADKITPWNFDEIVDKESSAEAFINRMTNYDLYLPNQKVLPKHSLLYEKFTVYNELTKVKYKTEQGKTAFFDANMKQEIFDGVFKVYRKVTKDKLMDFLEKEFDEFRIVDLTGLDKENKAFNASYGTYHDLRKILDKDFLDNSKNEKILEDIVLTLTLFEDREMIRKRLENYSDLLTKEQVKKLERRHYTGWGRLSAELIHGIRNKESRKTILDYLIDDGNSNRNFMQLINDDALSFKEEIAKAQVIGETDNLNQVVSDIAGSPAIKKGILQSLKIVDELVKIMGHQPENIVVEMARENQFTNQGRRNSQQRLKGLTDSIKEFGSQILKEHPVENSQLQNDRLFLYYLQNGRDMYTGEELDIDYLSQYDIDHIIPQAFIKDNSIDNRVLTSSKENRGKSDDVPSEDVVNRMRPFWNKLLSSGLISQRKYNNLTKKELTPDDKAGFIKRQLVETRQITKHVARMLDERFNKEFDDNNKRIRRVKIVTLKSNLVSSFRKEFELYKVREINDYHHAHDAYLNAVVVKALLVKYPKLEPEFVYGEYPKYNSYRERKTATQKMFFYSNIMNMFKSKVKLADDQIVERPMIEVNDETGEIAWDKTKHITTVKKVLSYPQVNIVKKVEEQTIGQNGGLFDDNPKSPLEVIPSKLVPLKKALNPEKYGGYQKPTTAYPILLIVDTKQLIPISVMDKKRFEQNPVKFLKDKGYQQIEKNNFVKLPKYTLVDIGNGIKRLWASSKEVHKGNQLVVSKKSQDLLYHAHHLDNDYSNEYVKNHYQQFDILFNEITSFSKKCKLGKEHIQKIEEAYSKERDSASIEELADGFIKLLGFTQLGATSPFSFLGIKLNQKQYTGKKDYLLPCMEATLIHQSITGLYETRIDLSKLGGD

SEQ ID NO: 677 - protein, 1388 aa, Streptococcus thermophilus (strain ND03)
MTKPYSIGLDIGTNSVGWAVITDNYKVPSKKMKVLGNTSKKYIKKNLLGVLLFDSGITAEGRRLKRTARRRYTRRRNRILYLQEIFSTEMATLDDAFFQRLDDSFLVPDDKRDSKYPIFGNLVEEKAYHDEFPTIYHLRKYLADSTKKADLRLVYLALAHMIKYRGHFLIEGEFNSKNNDIQKNFQDFLDTYNAIFESDLSLENSKQLEEIVKDKISKLEKKDRILKLFPGEKNSGIFSEFLKLIVGNQADFRKCFNLDEKASLHFSKESYDEDLETLLGYIGDDYSDVFLKAKKLYDAILLSGFLTVTDNETEAPLSSAMIKRYNEHKEDLALLKEYIRNISLKTYNEVFKDDTKNGYAGYIDGKTNQEDFYVYLKNLLAEFEGADYFLEKIDREDFLRKQRTFDNGSIPYQIHLQEMRAILDKQAKFYPFLAKNKERIEKILTFRIPYYVGPLARGNSDFAWSIRKRNEKITPWNFEDVIDKESSAEAFINRMTSFDLYLPEEKVLPKHSLLYETFNVYNELTKVRFIAESMRDYQFLDSKQKKDIVRLYFKDKRKVTDKDIIEYLHAIYGYDGIELKGIEKQFNSSLSTYHDLLNIINDKEFLDDSSNEAIIEEIIHTLTIFEDREMIKQRLSKFENIFDKSVLKKLSRRHYTGWGKLSAKLINGIRDEKSGNTILDYLIDDGISNRNFMQLIHDDALSFKKKIQKAQIIGDEDKGNIKEVVKSLPGSPAIKKGILQSIKIVDELVKVMGGRKPESIVVEMARENQYTNQGKSNSQQRLKRLEKSLKELGSKILKENIPAKLSKIDNNALQNDRLYLYYLQNGKDMYTGDDLDIDRLSNYDIDHIIPQAFLKDNSIDNKVLVSSASNRGKSDDFPSLEVVKKRKTFWYQLLKSKLISQRKFDNLTKAERGGLLPEDKAGFIQRQLVETRQITKHVARLLDEKFNNKKDENNRAVRTVKIITLKSTLVSQFRKDFELYKVCEINDFHHAHDAYLNAVIASALLKKYPKLEPEFVYGDYPKYNSFRERKSATEKVYFYSNIMNIFKKSISLADGRVIERPLIEVNEETGESVWNKESDLATVRRVLSYPQVNVVKKVEEQNHGLDRGKPKGLFNANLSSKPKPNSNENLVGAKEYLDPKKYGGYAGISNSFAVLVKGTIEKGAKKKITNVLEFQGISILDRINYRKDKLNFLLEKGYKDIELIIELPKYSLFELSDGSRRMLASILSTNNKRGEIHKGNQIFLSQKFVKLLYHAKRISNTINENHRKYVENHKKEFEELFYYILEFNENYVGAKKNGKLLNSAFQSWQNHSIDELCSSFIGPTGSERKGLFELTSRGSAADFEFLGVKIPRYRDYTPSSLLKDATLIHQSVTGLYETRIDLAKLGEG

SEQ ID NO: 678 - protein, 1368 aa, Streptococcus pyogenes serotype M12 (strain MGAS2096); identical to SEQ ID NO: 646

SEQ ID NO: 679 - protein, 1345 aa, Streptococcus mutans serotype c (strain NN2025)
MKKPYSIGLDIGTNSVGWAVVTDDYKVPAKKMKVLGNTDKSHIKKNLLGALLFDSGNTAADRRLKRTARRRYTRRRNRILYLQEIFAEEMSKVDDSFFHRLEDSFLVTEDKRGERHPIFGNLEEEVKYHENFPTIYHLRQYLADNPEKVDLRLVYLALAHIIKFRGHFLIEGKFDTRNNDVQRLFQEFLAVYDNTFENSSLQEQNVQVEEILTDKISKSAKKDRVLKLFPNEKSNGRFAEFLKLIVGNQADFKKHFELEEKAPLQFSKDTYEEELEVLLAQIGDNYAELFLSAKKLYDSILLSGILTVTDVSTKAPLSASMIQRYNEHQMDLAQLKQFIRQKLSDKYNEVFSDVSKDGYAGYIDGKTNQEAFYKYLKGLLNKIEGSGYFLDKIEREDFLRKQRTFDNGSIPHQIHLQEMRAIIRRQAEFYPFLADNQDRIEKILTFRIPYYVGPLARGKSDFAWLSRKSADKITPWNFDEIVDKESSAEAFINRMTNYDLYLPNQKVLPKHSLLYEKFTVYNELTKVKYKTEQGKTAFFDANMKQEIFDGVFKVYRKVTKDKLMDFLEKEFDEFRIVDLTGLDKENKAFNASYGTYHDLRKILDKDFLDNSKNEKILEDIVLTLTLFEDREMIRKRLENYSDLLTKEQVKKLERRHYTGWGRLSAELIHGIRNKESRKTILDYLIDDGNSNRNFMQLINDDALSFKEEIAKAQVIGETDNLNQVVSDIAGSPAIKKGILQSLKIVDELVKIMGHQPENIVVEMARENQFTNQGRRNSQQRLKGLTDSIKEFGSQILKEHPVKHSQLQNDRLFLYYLQNGRDMYTGEELDIDYLSQYDIDHIIPQAFIKDNSIDNRVLTSSKENRGKSDDVPSKNVVRKMKSYWSKLLSAKLITQRKFDNLTKAERGGLTDDDKAGFIKRQLVETRQITKHVARILDERFHTETDENNKKIRQVKIVTLKSNLVSNFRKEFELYKVREINDYHHAHDAYLNAVIGKALLGVYPQLEPEFVYGDYPHFHGHKENKATAKKFFYSNIMNFFKKDDVRTDKNGEIIWKKDEHISNIKKVLSYPQVNIVKKVEEQTGGFSKESILPKGNSDKLIPRKTKKFYWDTKKYGGFDSPIVAYSILVIADIEKGKSKKLKTVKALVGVTIMEKMTFERDPVAFLERKGYRNVQEENIIKLPKYSLFKLENGRKRLLASARELQKGNEIVLPNHLGTLLYHAKNIHKVDEPKHLDYVDKHKDEFKELLDVVSNFSKKYTLAEGNLEKIKELYAQNNGEDLKELASSFINLLTFTAIGAPATFKFFDKNIDRKRYTSTTEILNATLIHQSITGLYETRIDLSKLGGD

SEQ ID NO: 680 - protein, 1371 aa, Streptococcus dysgalactiae subsp. equisimilis (strain GGS_124)
MDKKYSIGLDIGTNSVGWAVITDDYKVPSKKFKVLGNTDRHSIKKNLIGALLFDSGETAEATRLKRTARRRYTRRKNRIRYLQEIFSSEMSKVDDSFFHRLEESFLVEEDKKHERHPIFGNIVDEVAYHEKYPTIYHLRKKLADSTDKADLRLIYLALAHMIKFRGHFLIEGDLNPDNSDMDKLFIQLVQTYNQLFEENPINASRVDAKAILSARLSKSRRLENLIAQLPGEKRNGLFGNLIALSLGLTPNFKSNFDLAEDAKLQLSKDTYDDDLDNLLAQIGDQYADLFLAAKNLSDAILLSDILRVNSEITKAPLSASMIKRYDEHHQDLTLLKALVRQQLPEKYKEIFFDQSKNGYAGYIDGGASQEEFYKFIKPILEKMDGTEELLAKLNREDLLRKQRTFDNGSIPHQIHLGELHAILRRQEDFYPFLKDNREKIEKILTFRIPYYVGPLARGNSRFAWMTRKSEETITPWNFEEVVDKGASAQSFIERMTNFDKNLPNEKVLPKHSLLYEYFTVYNELTKVKYVTEGMRKPEFLSGKQKEAIVDLLFKTNRKVTVKQLKEDYFKKIECFDSVEISGVEDRFNASLGTYHDLLKIIKDKDFLDNEENEDILEDIVLTLTLFEDKEMIEERLKKYANLFDDKVMKQLKRRHYTGWGRLSRKLINGIRDKQSGKTILDFLKSDGFANRNFMQLINDDSLTFKEAIQKAQVSGQGHSLHEQIANLAGSPAIKKGILQSVKVVDELVKVMGHKPENIVIEMARENQTTQKGQKNSRERMKRIEEGIKELGSQILKEHPVENTQLQNEKLYLYYLQNGRDMYVDQELDINRLSDYDVDHIVPQSFIKDDSIDNKILTRSDKNRGKSDNVPSEEVVKKMKNYWRQLLNAKLITQRKFDNLTKAERGGLSELDKAGFIKRQLVETRQITKHVAQILDSRMNTKYDENDKLIREVKVITLKSKLVSDFRKDFQFYKVREINNYHHAHDAYLNAVVGTALIKKYTKLESEFVYGDYKVYDVRKMIAKSEQEIGKATAKRFFYSNIMNFFKTEITLANGEIRKRPLIETNEETGEIVWDKGRDFATVRKVLSMPQVNIVKKTEVQTGALTNESIYARGSFDKLISRKHRFESSKYGGFGSPTVTYSVLVVAKSKVQDGKVKKIKTGKELIGMTLLDKLVFEKNPLKFIEDKGYGNVQIDKCIKLPKYSLFEFENGTRRMLASVMANNNSRGDLQKANEMFLPAKLVTLLYHAHKIESSKELEHEAYILDHYNDLYQLLSYIERFASLYVDVEKNISKVKELFSNIESYSISEICSSVINLLTLTASGAPADFKFLGTTIPRKRYGSPQSILSSTLIHQSITGLYETRIDLSQLGGD

SEQ ID NO: 681 - protein, 1370 aa, Streptococcus agalactiae serotype V (strain ATCC BAA-611 / 2603 V/R); identical to SEQ ID NO: 575

SEQ ID NO: 682 - protein, 1371 aa, Streptococcus gallolyticus (strain ATCC 43143 / F-1867)
MTEKNYSIGLDIGTNSVGWAVITDDYKVPAKKMKVLGNTDKKYIKKNLLGALLFDNGETAEATRLKRTARRRYTRRKNRLRYLQEIFAEEMAKVDESFFYRLDESFLTTDDKDFERHPIFGNKADEIKYHQEFPTIYHLRKHLADSHEKADLRLIYLALAHMIKFRGHFLIEGELNAENTDVQKLFEAFVEVYDRTFDDSNLSEITVDASSILTEKFSKSRRLENLIKHYPTEKKNTLFGNLVALALGLQPNFKTSFKLSEDAKLQFSKDTYEEDLEELIGKIGDEYADLFTSAKNLYDAILLSGILTVADNTTKAPLSASMIKRYNEHQVDLKKLKEFIKNNASDKYDEIFNDKDKNGYAGYIENGVKQDEFYKYLKTTLSKIDGSDYFLDKIEREDFLRKQRTFDNGSIPHQIHLQEMHAILRRQGEHYAFLKENQAKIEKILTFRIPYYVGPLARKNSRFAWAEYHSDEKITPWNFDEIIDKEKSAEKFITRMTLNDLYLPEEKVLPKHSLVYETYTVYNELTKVKYVNEQGKSNFFDANMKQEIFEHVFKENRKVTKDKFLNYLNKEFPEYRIQDLIGLDKENKSFNASLGTYHDLKKILDKSFLDDKTNETIIEDIIQTLTLFEDRDMIRQRLQKYSDIFTPQQLKKLERRHYTGWGRLSYKLINGIRNKENGKSILDYLIDDGYANRNFMQLISDDTLPFKQIIKDAQIIGDIDDVTSVVRELPGSPAIKKGILQSVKIVDELVKVMGHNPDNIVIEMARENQTTNRGRNQSQQRLKKLQDSLKELGSNILNEEKPSYIEGKVENNHLQDDRLFLYYIQNGKDMYTGDELDIDHLSDYDIDHIIPQAFIKDDSIDNRVLTSSAKNRGKSDDVPSLDIVHDRKADWIRLYKSGLISKRKFDNLTKAERGGLTENDKAGFIKRQLVETRQITKHVAQILDSRFNTERDENDKVIRNVKVITLKSNLVSQFRKDFKFYKVREINDYHHAHDAYLNAVVGTALLKKYPKLAPEFVYGEYKKYDIRKFITSSGDKATAKYFFYSNLMNFFKRVIRYSNGKVVVRPVIECSKDTGEIAWNKQTDFEKVRRVLSYPQVNIVKKVETQTGGFSKESILPKGNSDKLIPRKTKKFRWDTPKYGGFDSPNIAYSVFVIADVEKGKAKKLKTVKELVGISIMERSSFEENPVVFLEKKGYQNVQEDNLIKLPKYSLFEFEGGRRRLLASASELQKGNEVVLSRHLVELLYHAHRVNSFNNSEHLKYVSEHKKEFGEVLSCVENFAKSYVDVEKNLGKIRAVADKIDTFSIEDISISFVNLLTLTALGAPADFNFLGEKIPRKRYTSTKECLNATLIHQSITGLYETRIDLSKLGEE

SEQ ID NO: 683 - protein, 1371 aa, Streptococcus gallolyticus (strain UCN34); identical to SEQ ID NO: 682

SEQ ID NO: 684 - protein, 1370 aa, Streptococcus agalactiae serotype Ia (strain GD201008-001); identical to SEQ ID NO: 575

SEQ ID NO: 685 - protein, 1377 aa, Streptococcus agalactiae serotype III (strain NEM316)
MNKPYSIGLDIGTNSVGWSIITDDYKVPAKKMRVLGNTDKEYIKKNLIGALLFDGGNTAADRRLKRTARRRYTRRRNRILYLQEIFAEEMSKVDDSFFHRLEDSFLVEEDKRGSKYPIFATMQEEKYYHEKFPTIYHLRKELADKKEKADLRLVYLALAHIIKFRGHFLIEDDRFDVRNTDIQKQYQAFLEIFDTTFENNHLLSQNVDVEAILTDKISKSAKKDRILAQYPNQKSTGIFAEFLKLIVGNQADFKKHFNLEDKTPLQFAKDSYDEDLENLLGQIGDEFADLFSVAKKLYDSVLLSGILTVTDLSTKAPLSASMIQRYDEHHEDLKHLKQFVKASLPENYREVFADSSKDGYAGYIEGKTNQEAFYKYLLKLLTKQEGSEYFLEKIKNEDFLRKQRTFDNGSIPHQVHLTELRAIIRRQSEYYPFLKENQDRIEKILTFRIPYYVGPLAREKSDFAWMTRKTDDSIRPWNFEDLVDKEKSAEAFIHRMTNNDLYLPEEKVLPKHSLIYEKFTVYNELTKVRFLAEGFKDFQFLNRKQKETIFNSLFKEKRKVTEKDIISFLNKVDGYEGIAIKGIEKQFNASLSTYHDLKKILGKDFLDNTDNELILEDIVQTLTLFEDREMIKKCLDIYKDFFTESQLKKLYRRHYTGWGRLSAKLINGIRNKENQKTILDYLIDDGSANRNFMQLINDDDLSFKPIIDKARTGSHSDNLKEVVGELAGSPAIKKGILQSLKIVDELVKVMGYEPEQIVVEMARENQTTAKGLSRSRQRLTTLRESLANLKSNILEEKKPKYVKDQVENHHLSDDRLFLYYLQNGRDMYTKKALDIDNLSQYDIDHIIPQAFIKDDSIDNRVLVSSAKNRGKSDDVPSIEIVKARKMFWKNLLDAKLMSQRKYDNLTKAERGGLTSDDKARFIQRQLVETRQITKHVARILDERFNNEVDNGKKICKVKIVTLKSNLVSNFRKEFGFYKIREVNDYHHAHDAYLNAVVAKAILTKYPQLEPEFVYGMYRQKKLSKIVHEDKEEKYSEATRKMFFYSNLMNMFKRVVRLADGSIVVRPVIETGRYMRKTAWDKKKHFATVRKVLSYPQNNIVKKTEIQTGGFSKESILAHGNSDKLIPRKTKDIYLDPKKYGGFDSPIVAYSVLVVADIKKGKAQKLKTVTELLGITIMERSRFEKNPSAFLESKGYLNIRDDKLMILPKYSLFELENGRRRLLASAGELQKGNELALPTQFMKFLYLASRYNESKGKPEEIEKKQEFVNQHVSYFDDILQLINDFSKRVILADANLEKINKLYQDNKENIPVDELANNIINLFTFTSLGAPAAFKFFDKIVDRKRYTSTKEVLNSTLIHQSITGLYETRIDLGKLGED

SEQ ID NO: 686 - protein, 1368 aa, Streptococcus pyogenes serotype M3 (strain SSI-1)
MDKKYSIGLDIGTNSVGWAVITDDYKVPSKKLKGLGNTDRHGIKKNLIGALLFDSGETAEATRLKRTARRRYTRRKNRICYLQEIFSNEMAKVDDSFFHRLEESFLVEEDKKHERHPIFGNIVDEVAYHEKYPTIYHLRKKLADSTDKVDLRLIYLALAHMIKFRGHFLIEGDLNPDNSDVDKLFIQLVQTYNQLFEENPINASRVDAKAILSARLSKSRRLENLIAQLPGEKKNGLFGNLIALSLGLTPNFKSNFDLAEDAKLQLSKDTYDDDLDNLLAQIGDQYADLFLAAKNLSDATLLSDILRVNSEITKAPLSASMIKRYDEHHQDLTLLKALVRQQLPEKYKEIFFDQSKNGYAGYIDGGASQEEFYKFIKPILEKMDGTEELLAKLNREDLLRKQRTFDNGSIPYQIHLGELHAILRRQEDFYPFLKDNREKIEKILTFRIPYYVGPLARGNSRFAWMTRKSEETITPWNFEEVVDKGASAQSFIERMTNFDKNLPNEKVLPKHSLLYEYFTVYNELTKVKYVTEGMRKPAFLSGEQKKAIVDLLFKTNRKVTVKQLKEDYFKKIECFDSVEISGVEDRFNASLGTYHDLLKIIKDKDFLDNEENEDILEDIVLTLTLFEDREMIEERLKTYAHLFDDKVMKQLKRRRYTGWGRLSRKLINGIRDKQSGKTILDFLKSDGFANRNFMQLIHDDSLTFKEDIQKAQVSGQGDSLHEHIANLAGSPAIKKGILQTVKVVDELVKVMGRHKPENIVIEMARENQTTQKGQKNSRERMKRIEEGIKELGSDILKEYPVENTQLQNEKLYLYYLQNGRDMYVDQELDINRLSDYDVDHIVPQSFLKDDSIDNKVLTRSDKNRGKSDNVPSEEVVKKMKNYWRQLLNAKLITQRKFDNLTKAERGGLSELDKVGFIKRQLVETRQITKHVAQILDSRMNTKYDENDKLIREVRVITLKSKLVSDFRKDFQFYKVREINNYHHAHDAYLNAVVGTALIKKYPKLESEFVYGDYKVYDVRKMIAKSEQEIGKATAKYFFYSNIMNFFKTEITLANGEIRKRPLIETNGETGEIVWDKGRDFATVRKVLSMPQVNIVKKTEVQTGGFSKESILPKRNSDKLIARKKDWDPKKYGGFDSPTVAYSVLVVAKVEKGKSKKLKSVKELLGITIMERSSFEKDPIDFLEAKGYKEVRKDLIIKLPKYSLFELENGRKRMLASAGELQKGNELALPSKYVNFLYLASHYEKLKGSPEDNEQKQLFVEQHKHYLDEIIEQISEFSKRVILADANLDKVLSAYNKHRDKPIREQAENIIHLFTLTNLGAPAAFKYFDTTIDRKRYTSTKEVLDATLIHQSITGLYETRIDLSQLGGD

SEQ ID NO: 687 - protein, 1345 aa, Streptococcus mutans serotype c (strain ATCC 700610 / UA159); identical to SEQ ID NO: 602

SEQ ID NO: 688 - protein, 1370 aa, Streptococcus gallolyticus (strain ATCC BAA-2069); identical to SEQ ID NO: 594

SEQ ID NO: 689 - protein, 1368 aa, Streptococcus pyogenes serotype M49 (strain NZ131)
MDKKYSIGLDIGTNSVGWAVITDDYKVPSKKFKVLGNTDRHSIKKNLIGALLFDSGETAEATRLKRTARRRYTRRKNRICYLQEIFSNEIAKVDDSFFHRLEESFLVEEDKKHERHPIFGNIVDEVAYHEKYPTIYHLRKKLADSTDKADLRLIYLALAHMIKFRGHFLIEGDLNPDNSDVDKLFIQLVQTYNQLFEENPINASRVDAKAILSARLSKSRRLENLIAQLPGEKRNGLFGNLIALSLGLTPNFKSNFDLAEDAKLQLSKDTYDDDLDNLLAQIGDQYADLFLAAKNLSDAILLSDILRVNTEITKAPLSASMIKRYDEHHQDLTLLKALVRQQLPEKYKEIFFDQSKNGYAGYIDGGASQEEFYKFIKPILEKMDGTEELLAKLNREDLLRKQRTFDNGSIPHQIHLGELHAILRRQEDFYPFLKDNREKIEKILTFRIPYYVGPLARGNSRFAWMTRKSEETITPWNFEEVVDKGASAQSFIERMTNFDKNLPNEKVLPKHSLLYEYFTVYNELTKVKYVTEGMRKPAFLSGEQKKAIVDLLFKTNRKVTVKQLKEDYFKKIECFDSVEISGVEDRFNASLGTYHDLLKIIKDKDFLDNEENEDILEDIVLTLTLFEDREMIEERLKTYAHLFDDKVMKQLKRRRYTGWGRLSRKLINGIRDKQSGKTILDFLKSDGFANRNFMQLIHDDSLTFKEDLQKAQVSGQGDSLHEHIANLAGSPAIKKGILQTVKVVDELVKVMGRHKPENIVIEMARENQTTQKGQKNSRERMKRIEEGIKELGSDILKEYPVETTQLQNEKLYLYYLQNGRDMYVDQELDINRLSDYDVDHIVPQSFLKDDSIDNKVLTRSDKNRGKSDNVPSEEVVKKMKNYWKQLLNAKLITQRKFDNLTKAERGGLSELDKAGFIKRQLVETRQITKHVAQILDSRMNTKYDENDKLIREVRVITLKSKLVSDFRKDFQFYKVREINNYHHAHDAYLNAVVGTALIKKYPKLESEFVYGDYKVYDIRKMIAKSEQEIGKATAKYFFYSNIMNFFKTEITLANGEIRKRPLIETNGETGEIVWDKGRDFATVRKVLSMPQVNIVKKTEVQTGGFSKESILPKRNSDKLIARKKDWDPKKYGGFDSPTVAYSVLVVAKVEKGKSKKLKSVKELVGITIMERSSFEKDPVDFLEAKGYKEVRKDLIIKLPKYSLFELENGRKRMLASAGELQKGNELALPSKYVNFLYLASHYEKLKGSPEDNEQKQLFVEQHKHYLDEIIEQISEFSKRVILADANLDKVLSAYNKHRDKPIREQAENIIHLFTLTNLGAPAAFKCFDTTIGRNRYKSIKEVLDATLIHQSITGLYETRIDLSQLGGD

SEQ ID NO: 690 - protein, 1370 aa, Streptococcus agalactiae serotype Ia (strain ATCC 27591 / A909 / CDC SS700); identical to SEQ ID NO: 575

SEQ ID NO: 691 - protein, 1371 aa, Streptococcus dysgalactiae subsp. equisimilis (strain ATCC 12394 / D166B)
MDKKYSIGLDIGTNSVGWAVITDDYKVPSKKFKVLGNTDRHSIKKNLIGALLFDSGETAEATRLKRTARRRYTRRKNRIRYLQEIFSSEMSKVDDSFFHRLEESFLVEEDKKHERHPIFGNIVDEVAYHEKYPTIYHLRKKLADSTDKADLRLIYLALAHMIKFRGHFLIEGDLNPDNSDVDKLFIQLVQTYNQLFEEKPINASGVDAKAILSARLSKSKRLENLIAQLPGEKKNGLFGNLIALSLGLTPNFKSNFDLAEDAKLQLSKDTYDDDLDNLLAQIGNQYADLFLAAKNLSDAILLSDILRVNSEITKAPLSASMIKRYDEHHQDLTLLKALVRQQLPEKYKEIFFDQSKNGYAGYIDGGASQEEFYKFIKPILEKMDGTEELLAKLNREDLLRKQRTFDNGSIPHQIHLGELHAILRRQEDFYPFLKDNREKIEKILTFRIPYYVGPLARGNSRFAWMTRKSEETITPWNFEEVVDKGASAQSFIERMTNFDKNLPNEKVLPKHSLLYEYFTVYNELTKVKYVTEGMRKPEFLSGKQKEAIVDLLFKTNRKVTVKQLKEDYFKKIECFDSVEISGVEDRFNASLGTYHDLLKIIKDKDFLDNEENEDILEDIVLTLTLFEDKEMIEERLKKYANLFDDKVMKQLKRRHYTGWGRLSRKLINGIRDKQSGKTILDFLKSDGFANRNFMQLINDDSLTFKEAIQKAQVSGQGHSLHEQIANLAGSPAIKKGILQSVKVVDELVKVMGHKPENIVIEMARENQTTQKGQKNSRERMKRIEEGIKELGSQILKEHPVENTQLQNEKLYLYYLQNGRDMYVDQELDINRLSDYDVDHIVPQSFIKDDSIDNKVLTRSDKNRGKSDNVPSEEVVKKMKNYWRQLLNAKLITQRKFDNLTKAERGGLSELDKAGFIKRQLVETRQITKHVAQILDSRMNTKYDENDKLIREVKVITLKSKLVSDFRKDFQFYKVREINNYHHAHDAYLNAVVGTALIKKYPKLESEFVYGDYKVYDVRKMIAKSEQEIGKATAKRFFYSNIMNFFKTEITLANGEIRKRPLIETNEETGEIVWDKGRDFATVRKVLSMPQVNIVKKTEVQTGALTNESIYARGSFDKLISRKHRFESSKYGGFGSPTVTYSVLVVAKSKVQDGKVKKIKTGKELIGITLLDKLVFEKNPLKFIEDKGYGNVQIDKCIKLPKYSLFEFENGTRRMLASVMANNNSRGDLQKANEMFLPAKLVTLLYHAHKIESSKELEHEAYILDHYNDLYQLLSYIERFASLYVDVEKNISKVKELFSNIESYSISEICSSVINLLTLTASGAPADFKFLGTTIPRKRYGSPQSILSSTLIHQSITGLYETRIDLSQLGGD

SEQ ID NO: 692 - protein, 1375 aa, Streptococcus infantarius (strain CJ18)
MEKSYSIGLDIGTNSVGWAVITDDYKVPAKKMKVLGNTDKKYIKKNLLGALLFDSGETAEVTRLKRTARRRYTRRKNRLRYLQEIFAKEMTKVDESFFQRLEESFLTDDDKTFDSHPIFGNKAEEDAYHQKFPTIYHLRKYLADSQEKADLRLVYLALAHMIKYRGHFLIEGELNAENTDVQKLFNVFVETYDKIVDESHLSEIEVDASSILTEKVSKSRRLENLIKQYPTEKKNTLFGNLIALALGLQPNFKTNFKLSEDAKLQFSKDTYEEDLEELLGKVGDDYADLFISAKNLYDAILLSGILTVDDNSTKAPLSASMIKRYVEHHEDLEKLKEFIKINKLKLYHDIFKDKTKNGYAGYIDNGVKQDEFYKYLKTILTKIDDSDYFLDKIERDDFLRKQRTFDNGSIPHQIHLQEMHSILRRQGDYYPFLKENQAKIEKILTFRIPYYVGPLARKDSRFAWANYHSDEPITPWNFDEVVDKEKSAEKFITRMTLNDLYLPEEKVLPKHSHVYETFTVYNELTKIKYVNEQGESFFFDANMKQEIFDHVFKENRKVTKAKLLSYLNNEFEEFRINDLIGLDKDSKSFNASLGTYHDLKKILDKSFLDDKTNGQIIEDIVLTLTLFEDRDMIHERLQKYSDFFTSQQLKKLERRHYTGWGRLSYKLINGIRNKENNKTILDFLIDDGHANRNFMQLINDESLSFKTIIQEAQVVGDVDDIEAVVHDLPGSPAIKKGILQSVKIVDELVKVMGDNPDNIVIEMARENQTTGYGRNKSNQRLKRLQDSLKEFGSDILSKKKPSYVDSKVENSHLQNDRLFLYYIQNGKDMYTGEELDIDRLSDYDIDHIIPQAFIKDNSIDNKVLTSSAKNRGKSDDVPSIEIVRNRRSYWYKLYKSGLISKRKFDNLTKAERGGLTEADKAGFIKRQLVETRQITKHVAQILDARFNTKRDENDKVIRDVKVITLKSNLVSQFRKEFKFYKVREINDYHHAHDAYLNAVVGTALLKKYPKLTPEFVYGEYKKYDVRKLIAKSSDDYSEMGKATAKYFFYSNLMNFFKTEVKYADGRVFERPDIETNADGEVVWNKQKDFDIVRKVLSYPQVNIVKKVEAQTGGFSKESILSKGDSDKLIPRKTKKVYWNTKKYGGFDSPTVAYSVLVVADIEKGKAKKLKTVKELVGISIMERSFFEENPVSFLEKKGYHNVQEDKLIKLPKYSLFEFEGGRRRLLASATELQKGNEVMLPAHLVELLYHAHRIDSFNSTEHLKYVSEHKKEFEKVLSCVENFSNLYVDVEKNLSKVRAAAESMTNFSLEEISASFINLLTLTALGAPADFNFLGEKIPRKRYTSTKECLSATLIHQSVTGLYETRIDLSKLGEE

SEQ ID NO: 693 - protein, 1368 aa, Streptococcus pyogenes serotype M1; identical to SEQ ID NO: 601

SEQ ID NO: 694 - protein, 1371 aa, Streptococcus pyogenes serotype M4 (strain MGAS10750)
MDKKYSIGLDIGTNSVGWAVITDDYKVPSKKFKVLGNTDRHSIKKNLIGALLFDSGETAEATRLKRTARRRYTRRKNRICYLQEIFSNEMAKVDDSFFHRLEESFLVEEDKKHERHPIFGNIVDEVAYHEKYPTIYHLRKKLADSTDKADLRLIYLALAHMIKFRGHFLIEGDLNPDNSDVDKLFIQLVQTYNQLFEENPINASRVDAKAILSARLSKSRRLENLIAQLPGEKKNGLFGNLIALSLGLTPNFKSNFDLAEDAKLQLSKDTYDDDLDNLLAQIGDQYADLFLAAKNLSDATLLSDILRVNSEITKAPLSASMIKRYDEHHQDLTLLKALVRQQLPEKYKEIFFDQSKNGYAGYIDGGASQEEFYKFIKPILEKMDGTEELLAKLNREDLLRKQRTFDNGSIPHQIHLGELHAILRRQEDFYPFLKDNREKIEKILTFRIPYYVGPLARGNSRFAWMTRKSEETITPWNFEEVVDKGASAQSFIERMTNFDKNLPNEKVLPKHSLLYEYFTVYNELTKVKYVTEGMRKPAFLSGEQKKAIVDLLFKTNRKVTVKQLKEDYFKKIECFDSVEISGVEDRFNASLGTYHDLLKIIKDKDFLDNEENEDILEDIVLTLTLFEDKEMIEERLKTYAHLFDDKVMKQLKRRHYTGWGRLSRKLINGIRDKQSGKTILDFLKSDGFANRNFIQLIHDDSLTFKEAIQKAQVSGQGHSLHEQIANLAGSPAIKKGILQSVKVVDELVKVMGHKPENIVIEMARENQTTQKGQKNSRERMKRIEEGIKELGSQILKEHPVENTQLQNEKLYLYYLQNGRDMYVDQELDINRLSDYDVDHIVPQSFIKDDSIDNKVLTRSDKNRGKSDDVPSEEVVKKMKNYWRQLLNAKLITQRKFDNLTKAERGGLSELDKAGFIKRQLVETRQITKHVAQILDSRMNTKYDENDKLIREVKVITLKSKLVSDFRKDFQFYKVREINNYHHAHDAYLNAVVGTALIKKYPKLESEFVYGDYKVYDVRKMIAKSEQEIGKATAKRFFYSNIMNFFKTEITLANGEIRKRPLIETNEETGEIVWDKGRDFATVRKVLSMPQVNIVKKTEVQTGALTNESIYARGSFDKLISRKHRFESSKYGGFGSPTVTYSVLVVAKSKVQDGKVKKIKTGKELIGITLLDKLVFEKNPLKFIEDKGYGNVQIDKCIKLPKYSLFEFENGTRRMLASVMANNNSRGDLQKANEMFLPAKLVTLLYHAHKIESSKELEHEAYILDHYNDLYQLLSYIERFASLYVDVEKNISKVKELFSNIESYSISEICSSVINLLTLTASGAPADFKFLGTTIPRKRYGSPQSILSSTLIHQSITGLYETRIDLSQLGSD

SEQ ID NO: 695 - protein, 1368 aa, Streptococcus pyogenes serotype M3 (strain ATCC BAA-595 / MGAS315); identical to SEQ ID NO: 686

SEQ ID NO: 696 - protein, 1368 aa, Streptococcus pyogenes serotype M12 (strain MGAS9429)
MDKKYSIGLDIGTNSVGWAVITDDYKVPSKKFKVLGNTDRHSIKKNLIGALLFDSGEIAEATRLKRTARRRYTRRKNRICYLQEIFSNEMAKVDDSFFHRLEESFLVEEDKKHERHPIFGNIVDEVAYHEKYPTIYHLRKKLVDSTDKADLRLIYLALAHMIKFRGHFLIEGDLNPDNSDVDKLFIQLVQTYNQLFEENPINASGVDAKAILSARLSKSRRLENLIAQLPGEKKNGLFGNLIALSLGLTPNFKSNFDLAEDAKLQLSKDTYDDDLDNLLAQIGDQYADLFLAAKNLSDAILLSDILRLNSEITKAPLSASMIKRYDEHHQDLTLLKALVRQQLPEKYKEIFFDQSKNGYAGYIDGGASQEEFYKFIKPILEKMDGTEELLAKLNREDLLRKQRTFDNGSIPHQIHLGELHAILRRQEDFYPFLKDNREKIEKILTFRIPYYVGPLARGNSRFAWMTRKSEETITPWNFEEVVDKGASAQSFIERMTNFDKNLPNEKVLPKHSLLYEYFTVYNELTKVKYVTEGMRKPAFLSGEQKKAIVDLLFKTNRKVTVKQLKEDYFKKIECFDSVEISGVEDRFNASLGTYHDLLKIIKDKDFLDNEENEDILEDIVLTLTLFEDREMIEERLKTYAHLFDDKVMKQLKRRRYTVWGRLSRKLINGIRDKQSGKTILDFLKSDGFANRNFMQLIHDDSLTFKEDIQKAQVSGQGDSLHEHIANLAGSPAIKKGILQTVKVVDELVKVMGRHKPENIVIEMARENQTTQKGQKNSRERMKRIEEGIKELGSQILKEHPVENTQLQNEKLYLYYLQNGRDMYVDQELDINRLSDYDVDHIVPQSFIKDDSIDNKVLTRSDKNRGKSDNVPSEEVVKKMKNYWRQLLNAKLITQRKFDNLTKAERGGLSELDKAGFIKRQLVETRQITKHVAQILDSRMNTKYDENDKLIREVKVITLKSKLVSDFRKDFQFYKVREINNYHHAHDAYLNAVVGTALIKKYPKLESEFVYGDYKVYDVRKMLAKSEQEIGKATAKYFFYSNIMNFFKTEITLANGEIRKRPLIETNGETGEIVWDKGRDFATVRKVLSMPQVNIVKKTEVQTGGFSKESILPKRNSDKLIARKKDWDPKKYGGFDSPTVAYSVLVVAKVEKGKSKKLKSVKELLGITIMERSSFEKNPIDFLEAKGYKEVRKDLIIKLPKYSLFELENGRKRMLASAGELQKGNELALPSKYVNFLYLASHYEKLKGSPEDNEQKQLFVEQHKHYLDEIIEQISEFSKRVILADANLDKVLSAYNKHRDKPIREQAENIIHLFTLTNLGAPTAFKYFDTTIDRKRYTSTKEVLDATFIHQSITGLYETRIDLSQLGGD

SEQ ID NO: 697 - protein, 1368 aa, Streptococcus pyogenes serotype M28 (strain MGAS6180)
MDKKYSIGLDIGTNSVGWAVITDDYKVPSKKFKVLGNTDRHSIKKNLIGALLFDSGETAEATRLKRTARRRYTRRKNRICYLQEIFSNEMAKVDDSFFHRLEESFLVEEDKKHERHPIFGNIVDEVAYHEKYPTIYHLRKKLVDSTDKADLRLIYLALAHMIKFRGHFLIEGDLNPDNSDVDKLFIQLVQTYNQLFEENPINASGVDAKAILSARLSKSRRLENLIAQLPGEKKNGLFGNLIALSLGLTPNFKSNFDLAEDAKLQLSKDTYDDDLDNLLAQIGDQYADLFLAAKNLSDAILLSDILRLNSEITKAPLSASMIKRYDEHHQDLTLLKALVRQQLPEKYKEIFFDQSKNGYAGYIDGGASQEEFYKFIKPILEKMDGTEELLAKLNREDLLRKQRTFDNGSIPHQIHLGELHAILRRQEDFYPFLKDNREKIEKILTFRIPYYVGPLARGNSRFAWMTRKSEETITPWNFEEVVDKGASAQSFIERMTNFDKNLPNEKVLPKHSLLYEYFTVYNELTKVKYVTEGMRKPAFLSGEQKKAIVDLLFKTNRKVTVKQLKEDYFKKIECFDSVEISGVEDRFNASLGTYHDLLKIIKDKDFLDNEENEDILEDIVLTLTLFEDREMIEERLKTYAHLFDDKVMKQLKRRRYTGWGRLSRKLINGIRDKQSGKTILDFLKSDGFANRNFMQLIHDDSLTFKEDIQKAQVSGQGDSLHEHIANLAGSPAIKKGILQTVKVVDELVKVMGRHKPENIVIEMARENQTTQKGQKNSRERMKRIEEGIKELGSQILKEHPVENTQLQNEKLYLYYLQNGRDMYVDQELDINRLSDYDVDHIVPQSFIKDDSIDNKVLTRSDKNRGKSNNVPSEEVVKKMKNYWRQLLNAKLITQRKFDNLTKAERGGLSELDKAGFIKRQLVETRQITKHVAQILDSRMNTKYDENDKLIREVKVITLKSKLVSDFRKDFQFYKVREINNYHHAHDAYLNAVVGTALIKKYPKLESEFVYGDYKVYDVRKMIAKSEQEIGKATAKYFFYSNIMNFFKTEITLANGEIRKRPLIETNGETGEIVWDKGRDFATVRKVLSMPQVNIVKKTEVQTGGFSKESILPKRNSDKLIARKKDWDPKKYGGFDSPTVAYSVLVVAKVEKGKSKKLKSVKELLGITIMERSSFEKNPIDFLEAKGYKEVRKDLIVKLPKYSLFELENGRKRMLASAGELQKGNELALPSKYVNFLYLASHYEKLKGSPEDNEQKQLFVEQHKHYLDEIIEQISEFSKRVILADANLDKVLSAYNKHRDKPIREQAENIIHLFTLTNLGAPAAFKYFDTTIDRKRYTSTKEVLDATFIHQSITGLYETRIDLSQLGGD

SEQ ID NO: 698 - protein, 1368 aa, Streptococcus pyogenes serotype M2 (strain MGAS10270)
MDKKYSIGLDIGTNSVGWAVITDDYKVPSKKFKVLGNTDRHSIKKNLIGALLFDSGETAEATRLKRTARRRYTRRKNRICYLQEIFSNEMAKVDDSFFHRLEESFLVEEDKKHERHPIFGNIVDEVAYHEKYPTIYHLRKKLVDSTDKADLRLIYLALAHMIKFRGHFLIEGDLNPDNSDVDKLFIQLVQTYNQLFEENPINASGVDAKAILSARLSKSRRLENLIAQLPGEKKNGLFGNLIALSLGLTPNFKSNFDLAEDAKLQLSKDTYDDDLDNLLAQIGDQYADLFLAAKNLSDAILLSDILRLNSEITKAPLSASMIKRYDEHHQDLTLLKALVRQQLPEKYKEIFFDQSKNGYAGYIDGGASQEEFYKFIKPILEKMDGTEELLAKLNREDLLRKQRTFDNGSIPHQIHLGELHAILRRQEDFYPFLKDNREKIEKILTFRIPYYVGPLARGNSRFAWMTRKSEETITPWNFEEVVDKGASAQSFIERMTNFDKNLPNEKVLPKHSLLYEYFTVYNELTKVKYVTEGMRKPAFLSGEQKKAIVDLLFKTNRKVTVKQLKEDYFKKIECFDSVEISGVEDRFNASLGTYHDLLKIIKDKDFLDNEENEDILEDIVLTLTLFEDREMIEERLKTYAHLFDDKVMKQLKRRRYTGWGRLSRKLINGIRDKQSGKTILDFLKSDGFANRNFMQLIHDDSLTFKEDIQKAQVSGQGDSLHEHIANLAGSPAIKKGILQTVKVVDELVKVMGRHKPENIVIEMARENQTTQKGQKNSRERMKRIEEGIKELGSQILKEHPVENTQLQNEKLYLYYLQNGRDMYVDQELDINRLSDYDVDHIVPQSFIKDDSIDNKVLTRSDKNRGKSDNVPSEEVVKKMKNYWRQLLNAKLITQRKFDNLTKAERGGLSELDKAGFIKRQLVETRQITKHVAQILDSRMNTKYDENDKLIREVKVITLKSKLVSDFRKDFQFYKVREINNYHHAHDAYLNAVVGTALIKKYPKLESEFVYGDYKVYDVRKMIAKSEQEIGKATAKYFFYSNIMNFFKTEITLANGEIRKRPLIETNGETGEIVWDKGRDFATVRKVLSMPQVNIVKKTEVQTGGFSKESILPKRNSDKLIARKKDWDPKKYGGFDSPTVAYSVLVVAKVEKGKSKKLKSVKELLGLTIMERSSFEKNPIDFLEAKGYKEVKKDLIIKLPKYSLFELENGRKRMLASAGELQKGNELALPSKYVNFLYLASHYEKLKGSPEDNEQKQLFVEQHKHYLDEIIEQISEFSKRVILADANLDKVLSAYNKHRDKPIREQAENIIHLFTLTNLGAPAAFKYFDTTIDRKRYTSTKEVLDATLIHQSITGLYETRIDLSQLGGD

SEQ ID NO: 699 - protein, 1398 aa, Veillonella atypica ACS-134-V-Col7a
METQTSNQLITSHLKDYPKQDYFVGLDIGTNSVGWAVTNTSYELLKFHSHKMWGSRLFEEGESAVTRRGFRSMRRRLERRKLRLKLLEELFADAMAQVDSTFFIRLHESKYHYEDKTTGHSSKHILFIDEDYTDQDYFTEYPTIYHLRKDLMENGTDDIRKLFLAVHHILKYRGNFLYEGATFNSNAFTFEDVLKQALVNITFNCFDTNSAISSISNILMESGKTKSDKAKAIERLVDTYTVFDEVNTPDKPQKEQVKEDKKTLKAFANLVLGLSANLIDLFGSVEDIDDDLKKLQIVGDTYDEKRDELAKVWGDEIHIIDDCKSVYDAIILMSIKEPGLTISQSKVKAFDKHKEDLVILKSLLKLDRNVYNEMFKSDKKGLHNYVHYIKQGRTEETSCSREDFYKYTKKIVEGLADSKDKEYILNEIELQTLLPLQRIKDNGVIPYQLHLEELKVILDKCGPKFPFLHTVSDGFSVTEKLIKMLEFRIPYYVGPLNTHHNIDNGGFSWAVRKQAGRVTPWNFEEKIDREKSAAAFIKNLTNKCTYLFGEDVLPKSSLLYSEFMLLNELNNVRIDGKALAQGVKQHLIDSIFKQDHKKMTKNRIELFLKDNNYITKKHKPEITGLDGEIKNDLTSYRDMVRILGNNFDVSMAEDIITDITIFGESKKMLRQTLRNKFGSQLNDETIKKLSKLRYRDWGRLSKKLLKGIDGCDKAGNGAPKTIIELMRNDSYNLMEILGDKFSFMECIEEENAKLAQGQVVNPHDIIDELALSPAVKRAVWQALRIVDEVAHIKKALPSRIFVEVARTNKSEKKKKDSRQKRLSDLYSAIKKDDVLQSGLQDKEFGALKSGLANYDDAALRSKKLYLYYTQMGRCAYTGNIIDLNQLNTDNYDIDHIYPRSLTKDDSFDNLVLCERTANAKKSDIYPIDNRIQTKQKPFWAFLKHQGLISERKYERLTRIAPLTADDLSGFIARQLVETNQSVKATTTLLRRLYPDIDVVFVKAENVSDFRHNNNFIKVRSLNHHHHAKDAYLNIVVGNVYHEKFTRNFRLFFKKNGANRTYNLAKMFNYDVICTNAQDGKAWDVKTSMNTVKKMMASNDVRVTRRLLEQSGALADATIYKASVAAKAKDGAYIGMKTKYSVFADVTKYGGMTKIKNAYSIIVQYTGKKGEEIKEIVPLPIYLINRNATDIELIDYVKSVIPKAKDISIKYRKLCINQLVKVNGFYYYLGGKTNDKIYIDNAIELVVPHDIATYIKLLDKYDLLRKENKTLKASSITTSIYNINTSTVVSLSNKVGIDVFDYFMSKLRTPLYMKMKGNKVDELSSTGRSKFIKMTLEEQSIYLLEVLNLLTNSKTTFDVKPLGITGSRSTIGVKIHNLDEFKIINESITGLYSNEVTIV

SEQ ID NO: 700 - protein, 1374 aa, Fusobacterium nucleatum subsp. vincentii ATCC 49256
MKKQKFSDYYLGFDIGTNSVGWCVTDLDYNVLRFNKKDMWGSRLFDEAKTAAERRVQRNSRRRLKRRKWRLNLLEEIFSDEIMKIDSNFFRRLKESSLWLEDKNSKEKFTLFNDDNYKDYDFYKQYPTIFHLRDELIKNPEKKDIRLIYLALHSIFKSRGHFLFEGQNLKEIKNFETLYNNLISFLEDNGINKSIDKDNIEKLEKIICDSGKGLKDKEKEFKGIFNSDKQLVAIFKLSVGSSVSLNDLFDTDEYKKEEVEKEKISFREQIYEDDKPIYYSILGEKIELLDIAKSFYDFMVLNNILSDSNYISEAKVKLYEEHKKDLKNLKYIIRKYNKENYDKLFKDKNENNYPAYIGLNKEKDKKEVVEKSRLKIDDLIKVIKGYLPKPERIEEKDKTIFNEILNKIELKTILPKQRISDNGTLPYQIHEVELEKILENQSKYYDFLNYEENGVSTKDKLLKTFKFRIPYYVGPLNSYHKDKGGNSWIVRKEEGKILPWNFEQKVDIEKSAEEFIKRMTNKCTYLNGEDVIPKDSFLYSEYIILNELNKVQVNDEFLNEENKRKIIDELFKENKKVSEKKFKEYLLVNQIANRTVELKGIKDSFNSNYVSYIKFKDIFGEKLNLDIYKEISEKSILWKCLYGDDKKIFEKKIKNEYGDILNKDEIKKINSFKFNTWGRLSEKLLTGIEFINLETGECYSSVMEALRRTNYNLMELLSSKFTLQESIDNENKEMNEVSYRDLIEESYVSPSLKRAILQTLKIYEEIKKITGRVPKKVFIEMARGGDESMKNKKIPARQEQLKKLYDSCGNDIANFSIDIKEMKNSLSSYDNNSLRQKKLYLYYLQFGKCMYTGREIDLDRLLQNNDTYDIDHIYPRSKVIKDDSFDNLVLVLKNENAEKSNEYPVKKEIQEKMKSFWRFLKEKNFISDEKYKRLTGKDDFELRGFMARQLVNVRQTTKEVGKILQQIEPEIKIVYSKAEIASSFREMFDFIKVRELNDTHHAKDAYLNIVAGNVYNTKFTEKPYRYLQEIKENYDVKKIYNYDIKNAWDKENSLEIVKKNMEKNTVNITRFIKEEKGELFNLNPIKKGETSNEIISIKPKLYDGKDNKLNEKYGYYTSLKAAYFIYVEHEKKNKKVKTFERITRIDSTLIKNEKNLIKYLVSQKKLLNPKIIKKIYKEQTLIIDSYPYTFTGVDSNKKVELKNKKQLYLEKKYEQILKNALKFVEDNQGETEENYKFIYLKKRNNNEKNETIDAVKERYNIEFNEMYDKFLEKLSSKDYKNYINNKLYTNFLNSKEKFKKLKLWEKSLILREFLKIFNKNTYGKYEIKDSQTKEKLFSFPEDTGRIRLGQSSLGNNKELLEESVTGLFVKKIKL

SEQ ID NO: 701 - protein, 1365 aa, Filifactor alocis ATCC 35896
MTKEYYLGLDVGTNSVGWAVTDSQYNLCKFKKKDMWGIRLFESANTAKDRRLQRGNRRRLERKKQRIDLLQEIFSPEICKIDPTFFIRLNESRLHLEDKSNDFKYPLFIEKDYSDIEYYKEFPTIFHLRKHLIESEEKQDIRLIYLALHNIIKTRGHFLIDGDLQSAKQLRPILDTFLLSLQEEQNLSVSLSENQKDEYEEILKNRSIAKSEKVKKLKNLFEISDELEKEEKKAQSAVIENFCKFIVGNKGDVCKFLRVSKEELEIDSFSFSEGKYEDDIVKNLEEKVPEKVYLFEQMKAMYDWNILVDILETEEYISFAKVKQYEKHKTNLRLLRDIILKYCTKDEYNRMFNDEKEAGSYTAYVGKLKKNNKKYWIEKKRNPEEFYKSLGKLLDKIEPLKEDLEVLTMMIEECKNHTLLPIQKNKDNGVIPHQVHEVELKKILENAKKYYSFLTETDKDGYSVVQKIESIFRFRIPYYVGPLSTRHQEKGSNVWMVRKPGREDRIYPWNMEEIIDFEKSNENFITRMTNKCTYLIGEDVLPKHSLLYSKYMVLNELNNVKVRGKKLPTSLKQKVFEDLFENKSKVTGKNLLEYLQIQDKDIQIDDLSGFDKDFKTSLKSYLDFKKQIFGEEIEKESIQNMIEDIIKWITIYGNDKEMLKRVIRANYSNQLTEEQMKKITGFQYSGWGNFSKMFLKGISGSDVSTGETFDIITAMWETDNNLMQILSKKFTFMDNVEDFNSGKVGKIDKITYDSTVKEMFLSPENKRAVWQTIQVAEEIKKVMGCEPKKIFIEMARGGEKVKKRTKSRKAQLLELYAACEEDCRELIKEIEDRDERDFNSMKLFLYYTQFGKCMYSGDDIDINELIRGNSKWDRDHIYPQSKIKDDSIDNLVLVNKTYNAKKSNELLSEDIQKKMHSFWLSLLNKKLITKSKYDRLTRKGDFTDEELSGFIARQLVETRQSTKAIADIFKQIYSSEVVYVKSSLVSDFRKKPLNYLKSRRVNDYHHAKDAYLNIVVGNVYNKKFTSNPIQWMKKNRDTNYSLNKVFEHDVVINGEVIWEKCTYHEDTNTYDGGTLDRIRKIVERDNILYTEYAYCEKGELFNATIQNKNGNSTVSLKKGLDVKKYGGYFSANTSYFSLIEFEDKKGDRARHIIGVPIYIANMLEHSPSAFLEYCEQKGYQNVRILVEKIKKNSLLIINGYPLRIRGENEVDTSFKRAIQLKLDQKNYELVRNIEKFLEKYVEKKGNYPIDENRDHITHEKMNQLYEVLLSKMKKFNKKGMADPSDRIEKSKPKFIKLEDLIDKINVINKMLNLLRCDNDTKADLSLIELPKNAGSFVVKKNTIGKSKIILVNQSVTGLYENRREL

SEQ ID NO: 702 - protein, 1327 aa, Solobacterium moorei F0204
MEGQMKNNGNNLQQGNYYLGLDVGTSSVGWAVTDTDYNVLKFRGKSMWGARLFDEASTAEERRTHRGNRRRLARRKYRLLLLEQLFEKEIRKIDDNFFVRLHESNLWADDKSKPSKFLLFNDTNFTDKDYLKKYPTIYHLRSDLIHNSTEHDIRLVFLALHHLIKYRGHFIYDNSANGDVKTLDEAVSDFEEYLNENDIEFNIENKKEFINVLSDKHLTKKEKKISLKKLYGDITDSENINISVLIEMLSGSSISLSNLFKDIEFDGKQNLSLDSDIEETLNDVVDILGDNIDLLIHAKEVYDIAVLTSSLGKHKYLCDAKVELFEKNKKDLMILKKYIKKNHPEDYKKIFSSPTEKKNYAAYSQTNSKNVCSQEEFCLFIKPYIRDMVKSENEDEVRIAKEVEDKSFLTKLKGTNNSVVPYQIHERELNQILKNIVAYLPFMNDEQEDISVVDKIKLIFKFKIPYYVGPLNTKSTRSWVYRSDEKIYPWNFSNVIDLDKTAHEFMNRLIGRCTYTNDPVLPMDSLLYSKYNVLNEINPIKVNGKAIPVEVKQAIYTDLFENSKKKVTRKSIYIYLLKNGYIEKEDIVSGIDIEIKSKLKSHHDFTQIVQENKCTPEEIERIIKGILVYSDDKSMLRRWLKNNIKGLSENDVKYLAKLNYKEWGRLSKTLLTDIYTINPEDGEACSILDIMWNTNATLMEILSNEKYQFKQNIENYKAENYDEKQNLHEELDDMYISPAARRSIWQALRIVDEIVDIKKSAPKKIFIEMAREKKSAMKKKRTESRKDTLLELYKSCKSQADGFYDEELFEKLSNESNSRLRRDQLYLYYTQMGRSMYTGKRIDFDKLINDKNTYDIDHIYPRSKIKDDSITNRVLVEKDINGEKTDIYPISEDIRQKMQPFWKILKEKGLINEEKYKRLTRNYELTDEELSSFVARQLVETQQSTKALATLLKKEYPSAKIVYSKAGNVSEFRNRKDKELPKFREINDLHHAKDAYLNIVVGNVYDTKFTEKFFNNIRNENYSLKRVFDFSVPGAWDAKGSTFNTIKKYMAKNNPIIAFAPYEVKGELFDQQIVPKGKGQFPIKQGKDIEKYGGYNKLSSAFLFAVEYKGKKARERSLETVYIKDVELYLQDPIKYCESVLGLKEPQIIKPKILMGSLFSINNKKLVVTGRSGKQYVCHHIYQLSINDEDSQYLKNIAKYLQEEPDGNIERQNILNITSVNNIKLFDVLCTKFNSNTYEIILNSLKNDVNEGREKFSELDILEQCNILLQLLKAFKCNRESSNLEKLNNKKQAGVIVIPHLFTKCSVFKVIHQSITGLFEKEMDLLK

SEQ ID NO: 703 - protein, 1338 aa, Coprococcus catus GD-7
MKQEYFLGLDMGTGSLGWAVTDSTYQVMRKHGKALWGTRLFESASTAEERRMFRTARRRLDRRNWRIQVLQEIFSEEISKVDPGFFLRMKESKYYPEDKRDAEGNCPELPYALFVDDNYTDKNYHKDYPTIYHLRKMLMETTEIPDIRLVYLVLHHMMKHRGHFLLSGDISQIKEFKSTFEQLIQNIQDEELEWHISLDDAAIQFVEHVLKDRNLTRSTKKSRLIKQLNAKSACEKAILNLLSGGTVKLSDIFNNKELDESERPKVSFADSGYDDYIGIVEAELAEQYYIIASAKAVYDWSVLVEILGNSVSISEAKIKVYQKHQADLKTLKKIVRQYMTKEDYKRVFVDTEEKLNNYSAYIGMTKKNGKKVDLKSKQCTQADFYDFLKKNVIKVIDHKEITQEIESEIEKENFLPKQVTKDNGVIPYQVHDYELKKILDNLGTRMPFIKENAEKIQQLFEFRIPYYVGPLNRVDDGKDGKFTWSVRKSDARIYPWNFTEVIDVEASAEKFIRRMTNKCTYLVGEDVLPKDSLVYSKFMVLNELNNLRLNGEKISVELKQRIYEELFCKYRKVTRKKLERYLVIEGIAKKGVEITGIDGDFKASLTAYHDFKERLTDVQLSQRAKEAIVLNVVLFGDDKKLLKQRLSKMYPNLTTGQLKGICSLSYQGWGRLSKTFLEEITVPAPGTGEVWNIMTALWQTNDNLMQLLSRNYGFTNEVEEFNTLKKETDLSYKTVDELYVSPAVKRQIWQTLKVVKEIQKVMGNAPKRVFVEMAREKQEGKRSDSRKKQLVELYRACKNEERDWITELNAQSDQQLRSDKLFLYYIQKGRCMYSGETIQLDELWDNTKYDIDHIYPQSKTMDDSLNNRVLVKKNYNAIKSDTYPLSLDIQKKMMSFWKMLQQQGFITKEKYVRLVRSDELSADELAGFIERQIVETRQSTKAVATILKEALPDTEIVYVKAGNVSNFRQTYELLKVREMNDLHHAKDAYLNIVVGNAYFVKFTKNAAWFIRNNPGRSYNLKRMFEFDIERSGEIAWKAGNKGSIVTVKKVMQKNNILVTRKAYEVKGGLFDQQIMKKGKGQVPIKGNDERLADIEKYGGYNKAAGTYFMLVKSLDKKGKEIRTIEFVPLYLKNQIEINHESAIQYLAQERGLNSPEILLSKIKIDTLFKVDGFKMWLSGRTGNQLIFKGANQLILSHQEAAILKGVVKYVNRKNENKDAKLSERDGMTEEKLLQLYDTFLDKLSNTVYSIRLSAQIKTLTEKRAKFIGLSNEDQCIVLNEILHMFQCQSGSANLKLIGGPGSAGILVMNNNITACKQISVINQSPTGIYEKEIDLIKL

SEQ ID NO: 704 - protein, 1395 aa, Treponema denticola ATCC 35405
MKKEIKDYFLGLDVGTGSVGWAVTDTDYKLLKANRKDLWGMRCFETAETAEVRRLHRGARRRIERRKKRIKLLQELFSQEIAKTDEGFFQRMKESPFYAEDKTILQENTLFNDKDFADKTYHKAYPTINHLIKAWIENKVKPDPRLLYLACHNIIKKRGHFLFEGDFDSENQFDTSIQALFEYLREDMEVDIDADSQKVKEILKDSSLKNSEKQSRLNKILGLKPSDKQKKAITNLISGNKINFADLYDNPDLKDAEKNSISFSKDDFDALSDDLASILGDSFELLLKAKAVYNCSVLSKVIGDEQYLSFAKVKIYEKHKTDLTKLKNVIKKHFPKDYKKVFGYNKNEKNNNNYSGYVGVCKTKSKKLIINNSVNQEDFYKFLKTILSAKSEIKEVNDILTEIETGTFLPKQISKSNAEIPYQLRKMELEKILSNAEKHFSFLKQKDEKGLSHSEKIIMLLTFKIPYYIGPINDNHKKFFPDRCWVVKKEKSPSGKTTPWNFFDHIDKEKTAEAFITSRTNFCTYLVGESVLPKSSLLYSEYTVLNEINNLQIIIDGKNICDIKLKQKIYEDLFKKYKKITQKQISTFIKHEGICNKTDEVIILGIDKECTSSLKSYIELKNIFGKQVDEISTKNMLEEIIRWATIYDEGEGKTILKTKIKAEYGKYCSDEQIKKILNLKFSGWGRLSRKFLETVTSEMPGFSEPVNIITAMRETQNNLMELLSSEFTFTENIKKINSGFEDAEKQFSYDGLVKPLFLSPSVKKMLWQTLKLVKEISHITQAPPKKIFIEMAKGAELEPARTKTRLKILQDLYNNCKNDADAFSSEIKDLSGKIENEDNLRLRSDKLYLYYTQLGKCMYCGKPIEIGHVFDTSNYDIDHIYPQSKIKDDSISNRVLVCSSCNKNKEDKYPLKSEIQSKQRGFWNFLQRNNFISLEKLNRLTRATPISDDETAKFIARQLVETRQATKVAAKVLEKMFPETKIVYSKAETVSMFRNKFDIVKCREINDFHHAHDAYLNIVVGNVYNTKFTNNPWNFIKEKRDNPKIADTYNYYKVFDYDVKRNNITAWEKGKTIITVKDMLKRNTPIYTRQAACKKGELFNQTIMKKGLGQHPLKKEGPFSNISKYGGYNKVSAAYYTLIEYEEKGNKIRSLETIPLYLVKDIQKDQDVLKSYLTDLLGKKEFKILVPKIKINSLLKINGFPCHITGKTNDSFLLRPAVQFCCSNNEVLYFKKIIRFSEIRSQREKIGKTISPYEDLSFRSYIKENLWKKTKNDEIGEKEFYDLLQKKNLEIYDMLLTKHKDTIYKKRPNSATIDILVKGKEKFKSLIIENQFEVILEILKLFSATRNVSDLQHIGGSKYSGVAKIGNKISSLDNCILIYQSITGIFEKRIDLLKV

SEQ ID NO: 705 - protein, 1364 aa, Peptoniphilus duerdenii ATCC BAA-1640
MKNLKEYYIGLDIGTASVGWAVTDESYNIPKFNGKKMWGVRLFDDAKTAEERRTQRGSRRRLNRRKERINLLQDLFATEISKVDPNFFLRLDNSDLYREDKDEKLKSKYTLFNDKDFKDRDYHKKYPTIHHLIMDLIEDEGKKDIRLLYLACHYLLKNRGHFIFEGQKFDTKNSFDKSINDLKIHLRDEYNIDLEFNNEDLIEIITDTTLNKTNKKKELKNIVGDTKFLKAISAIMIGSSQKLVDLFEDGEFEETTVKSVDFSTTAFDDKYSEYEEALGDTISLLNILKSIYDSSILENLLKDADKSKDGNKYISKAFVKKFNKHGKDLKTLKRIIKKYLPSEYANIFRNKSINDNYVAYTKSNITSNKRTKASKFTKQEDFYKFIKKHLDTIKETKLNSSENEDLKLIDEMLTDIEFKTFIPKLKSSDNGVIPYQLKLMELKKILDNQSKYYDFLNESDEYGTVKDKVESIMEFRIPYYVGPLNPDSKYAWIKRENTKITPWNFKDIVDLDSSREEFIDRLIGRCTYLKEEKVLPKASLIYNEFMVLNELNNLKLNEFLITEEMKKAIFEELFKTKKKVTLKAVSNLLKKEFNLTGDILLSGTDGDFKQGLNSYIDFKNIIGDKVDRDDYRIKIEEIIKLIVLYEDDKTYLKKKIKSAYKNDFTDDEIKKIAALNYKDWGRLSKRFLTGIEGVDKTTGEKGSIIYFMREYNLNLMELMSGHYTFTEEVEKLNPVENRELCYEMVDELYLSPSVKRMLWQSLRVVDEIKRIIGKDPKKIFIEMARAKEAKNSRKESRKNKLLEFYKFGKKAFINEIGEERYNYLLNEINSEEESKFRWDNLYLYYTQLGRCMYSLEPIDLADLKSNNIYDQDHIYPKSKIYDDSLENRVLVKKNLNHEKGNQYPIPEKVLNKNAYGFWKILFDKGLIGQKKYTRLTRRTPFEERELAEFIERQIVETRQATKETANLLKNICQDSEIVYSKAENASRFRQEFDIIKCRTVNDLHHMHDAYLNIVVGNVYNTKFTKNPLNFIKDKDNVRSYNLENMFKYDVVRGSYTAWIADDSEGNVKAATIKKVKRELEGKNYRFTRMSYIGTGGLYDQNLMRKGKGQIPQKENTNKSNIEKYGGYNKASSAYFALIESDGKAGRERTLETIPIMVYNQEKYGNTEAVDKYLKDNLELQDPKILKDKIKINSLIKLDGFLYNIKGKTGDSLSIAGSVQLIVNKEEQKLIKKMDKFLVKKKDNKDIKVTSFDNIKEEELIKLYKTLSDKLNNGIYSNKRNNQAKNISEALDKFKEISIEEKIDVLNQIILLFQSYNNGCNLKSIGLSAKTGVVFIPKKLNYKECKLINQSITGLFENEVDLLNL

SEQ ID NO: 706 - protein, 1329 aa, Catenibacterium mitsuokai DSM 15897
IVDYCIGLDLGTGSVGWAVVDMNHRLMKRNGKHLWGSRLFSNAETAANRRASRSIRRRYNKRRERIRLLRAILQDMVLEKDPTFFIRLEHTSFLDEEDKAKYLGTDYKDNYNLFIDEDFNDYTYYHKYPTIYHLRKALCESTEKADPRLIYLALHHIVKYRGNFLYEGQKFNMDASNIEDKLSDIFTQFTSFNNIPYEDDEKKNLEILEILKKPLSKKAKVDEVMTLIAPEKDYKSAFKELVTGIAGNKMNVTKMILCEPIKQGDSEIKLKFSDSNYDDQFSEVEKDLGEYVEFVDALHNVYSWVELQTIMGATHTDNASISEAMVSRYNKHHDDLKLLKDCIKNNVPNKYFDMFRNDSEKSKGYYNYINRPSKAPVDEFYKYVKKCIEKVDTPEAKQILNDIELENFLLKQNSRTNGSVPYQMQLDEMIKIIDNQAEYYPILKEKREQLLSILTFRIPYYFGPLNETSEHAWIKRLEGKENQRILPWNYQDIVDVDATAEGFIKRMRSYCTYFPDEEVLPKNSLIVSKYEVYNELNKIRVDDKLLEVDVKNDIYNELFMKNKTVTEKKLKNWLVNNQCCSKDAEIKGFQKENQFSTSLTPWIDFTNIFGKIDQSNFDLIENIIYDLTVFEDKKIMKRRLKKKYALPDDKVKQILKLKYKDWSRLSKKLLDGIVADNRFGSSVTVLDVLEMSRLNLMEIINDKDLGYAQMIEEATSCPEDGKFTYEEVERLAGSPALKRGIWQSLQIVEEITKVMKCRPKYIYIEFERSEEAKERTESKIKKLENVYKDLDEQTKKEYKSVLEELKGFDNTKKISSDSLFLYFTQLGKCMYSGKKLDIDSLDKYQIDHIVPQSLVKDDSFDNRVLVVPSENQRKLDDLVVPFDIRDKMYRFWKLLFDHELISPKKFYSLIKTEYTERDEERFINRQLVETRQITKNVTQIIEDHYSTTKVAAIRANLSHEFRVKNHIYKNRDINDYHHAHDAYIVALIGGFMRDRYPNMHDSKAVYSEYMKMFRKNKNDQKRWKDGFVINSMNYPYEVDGKLIWNPDLINEIKKCFYYKDCYCTTKLDQKSGQLFNLTVLSNDAHADKGVTKAVVPVNKNRSDVHKYGGFSGLQYTIVAIEGQKKKGKKTELVKKISGVPLHLKAASINEKINYIEEKEGLSDVRIIKDNIPVNQMIEMDGGEYLLTSPTEYVNARQLVLNEKQCALIADIYNAIYKQDYDNLDDILMIQLYIELTNKMKVLYPAYRGIAEKFESMNENYVVISKEEKANIIKQMLIVMHRGPQNGNIVYDDFKISDRIGRLKTKNHNLNNIVFISQSPTGIYTKKYKL

SEQ ID NO: 707 - protein, 1345 aa, Streptococcus mutans UA159; identical to SEQ ID NO: 602

SEQ ID NO: 708 - protein, 1368 aa, Streptococcus pyogenes SF370 [sequence omitted]

SEQ ID NO: 709 - protein, 1334 aa, Listeria innocua Clip11262
MKKPYTIGLDIGTNSVGWAVLTDQYDLVKRKMKIAGDSEKKQIKKNFWGVRLFDEGQTAADRRMARTARRRIERRRNRISYLQGIFAEEMSKTDANFFCRLSDSFYVDNEKRNSRHPFFATIEEEVEYHKNYPTIYHLREELVNSSEKADLRLVYLALAHIIKYRGNFLIEGALDTQNTSVDGIYKQFIQTYNQVFASGIEDGSLKKLEDNKDVAKILVEKVTRKEKLERILKLYPGEKSAGMFAQFISLIVGSKGNFQKPFDLIEKSDIECAKDSYEEDLESLLALIGDEYAELFVAAKNAYSAVVLSSIITVAETETNAKLSASMIERFDTHEEDLGELKAFIKLHLPKHYEEIFSNTEKHGYAGYIDGKTKQADFYKYMKMTLENIEGADYFIAKIEKENFLRKQRTFDNGAIPHQLHLEELEAILHQQAKYYPFLKENYDKIKSLVTFRIPYFVGPLANGQSEFAWLTRKADGEIRPWNIEEKVDFGKSAVDFIEKMTNKDTYLPKENVLPKHSLCYQKYLVYNELTKVRYINDQGKTSYFSGQEKEQIFNDLFKQKRKVKKKDLELFLRNMSHVESPTIEGLEDSFNSSYSTYHDLLKVGIKQEILDNPVNTEMLENIVKILTVFEDKRMIKEQLQQFSDVLDGVVLKKLERRHYTGWGRLSAKLLMGIRDKQSHLTILDYLMNDDGLNRNLMQLINDSNLSFKSIIEKEQVTTADKDIQSIVADLAGSPAIKKGILQSLKIVDELVSVMGYPPQTIVVEMARENQTTGKGKNNSRPRYKSLEKAIKEFGSQILKEHPTDNQELRNNRLYLYYLQNGKDMYTGQDLDIHNLSNYDIDHIVPQSFITDNSIDNLVLTSSAGNREKGDDVPPLEIVRKRKVFWEKLYQGNLMSKRKFDYLTKAERGGLTEADKARFIHRQLVETRQITKNVANILHQRFNYEKDDHGNTMKQVRIVTLKSALVSQFRKQFQLYKVRDVNDYHHAHDAYLNGVVANTLLKVYPQLEPEFVYGDYHQFDWFKANKATAKKQFYTNIMLFFAQKDRIIDENGEILWDKKYLDTVKKVMSYRQMNIVKKTEIQKGEFSKATIKPKGNSSKLIPRKTNWDPMKYGGLDSPNMAYAVVIEYAKGKNKLVFEKKIIRVTIMERKAFEKDEKAFLEEQGYRQPKVLAKLPKYTLYECEEGRRRMLASANEAQKGNQQVLPNHLVTLLHHAANCEVSDGKSLDYIESNREMFAELLAHVSEFAKRYTLAEANLNKINQLFEQNKEGDIKAIAQSFVDLMAFNAMGAPASFKFFETTIERKRYNNLKELLNSTIIYQSITGLYESRKRLDD

SEQ ID NO: 710 - protein, 1388 aa, Streptococcus thermophilus LMD-9; identical to SEQ ID NO: 571

SEQ ID NO: 711 - protein, 1334 aa, Staphylococcus pseudintermedius
MGRKPYILSLDIGTGSVGYACMDKGFNVLKYHDKDALGVYLFDGALTAQERRQFRTSRRRKNRRIKRLGLLQELLAPLVQNPNFYQFQRQFAWKNDNMDFKNKSLSEVLSFLGYESKKYPTIYHLQEALLLKDEKFDPELIYMALYHLVKYRGHFLFDHLKIENLTNNDNMHDFVELIETYENLNNIKLNLDYEKTKVIYEILKDNEMTKNDRAKRVKNMEKKLEQFSIMLLGLKFNEGKLFNHADNAEELKGANQSHTFADNYEENLTPFLTVEQSEFIERANKIYLSLTLQDILKGKKSMAMSKVAAYDKFRNELKQVKDIVYKADSTRTQFKKIFVSSKKSLKQYDATPNDQTFSSLCLFDQYLIRPKKQYSLLIKELKKIIPQDSELYFEAENDTLLKVLNTTDNASIPMQINLYEAETILRNQQKYHAEITDEMIEKVLSLIQFRIPYYVGPLVNDHTASKFGWMERKSNESIKPWNFDEVVDRSKSATQFIRRMTNKCSYLINEDVLPKNSLLYQEMEVLNELNATQIRLQTDPKNRKYRMMPQIKLFAVEHIFKKYKTVSHSKFLEIMLNSNHRENFMNHGEKLSIFGTQDDKKFASKLSSYQDMTKIFGDIEGKRAQIEEIIQWITIFEDKKILVQKLKECYPELTSKQINQLKKLNYSGWGRLSEKLLTHAYQGHSIIELLRHSDENFMEILTNDVYGFQNFIKEENQVQSNKIQHQDIANLTTSPALKKGIWSTIKLVRELTSIFGEPEKIIMEFATEDQQKGKKQKSRKQLWDDNIKKNKLKSVDEYKYIIDVANKLNNEQLQQEKLWLYLSQNGKCMYSGQSIDLDALLSPNATKHYEVDHIFPRSFIKDDSIDNKVLVIKKMNQTKGDQVPLQFIQQPYERIAYWKSLNKAGLISDSKLHKLMKPEFTAMDKEGFIQRQLVETRQISVHVRDFLKEEYPNTKVIPMKAKMVSEFRKKFDIPKIRQMNDAHHAIDAYLNGVVYHGAQLAYPNVDLFDFNFKWEKVREKWKALGEFNTKQKSRELFFFKKLEKMEVSQGERLISKIKLDMNHFKINYSRKLANIPQQFYNQTAVSPKTAELKYESNKSNEVVYKGLTPYQTYVVAIKSVNKKGKEKMEYQMIDHYVFDFYKFQNGNEKELALYLAQRENKDEVLDAQIVYSLNKGDLLYINNHPCYFVSRKEVINAKQFELTVEQQLSLYNVMNNKETNVEKLLIEYDFIAEKVINEYHHYLNSKLKEKRVRTFFSESNQTHEDFIKALDELFKVVTASATRSDKIGSRKNSMTHRAFLGKGKDVKIAYTSISGLKTTKPKSLFKLAESRNEL

SEQ ID NO: 712 - protein, 1358 aa, Acidaminococcus intestini RyC-MR95
MGKMYYLGLDIGTNSVGYAVTDPSYHLLKFKGEPMWGAHVFAAGNQSAERRSFRTSRRRLDRRQQRVKLVQEIFAPVISPIDPRFFIRLHESALWRDDVAETDKHIFFNDPTYTDKEYYSDYPTIHHLIVDLMESSEKHDPRLVYLAVAWLVAHRGHFLNEVDKDNIGDVLSFDAFYPEFLAFLSDNGVSPWVCESKALQATLLSRNSVNDKYKALKSLIFGSQKPEDNFDANISEDGLIQLLAGKKVKVNKLFPQESNDASFTLNDKEDAIEEILGTLTPDECEWIAHIRRLFDWAIMKHALKDGRTISESKVKLYEQHHHDLTQLKYFVKTYLAKEYDDIFRNVDSETTKNYVAYSYHVKEVKGTLPKNKATQEEFCKYVLGKVKNIECSEADKVDFDEMIQRLTDNSFMPKQVSGENRVIPYQLYYYELKTILNKAASYLPFLTQCGKDAISNQDKLLSIMTFRIPYFVGPLRKDNSEHAWLERKAGKIYPWNFNDKVDLDKSEEAFIRRMTNTCTYYPGEDVLPLDSLIYEKFMILNEINNIRIDGYPISVDVKQQVFGLFEKKRRVTVKDIQNLLLSLGALDKHGKLTGIDTTIHSNYNTYHHFKSLMERGVLTRDDVERIVERMTYSDDTKRVRLWLNNNYGTLTADDVKHISRLRKHDFGRLSKMFLTGLKGVHKETGERASILDFMWNTNDNLMQLLSECYTFSDEITKLQEAYYAKAQLSLNDFLDSMYISNAVKRPIYRTLAVVNDIRKACGTAPKRIFIEMARDGESKKKRSVTRREQIKNLYRSIRKDFQQEVDFLEKILENKSDGQLQSDALYLYFAQLGRDMYTGDPIKLEHIKDQSFYNIDHIYPQSMVKDDSLDNKVLVQSEINGEKSSRYPLDAAIRNKMKPLWDAYYNHGLISLKKYQRLTRSTPFTDDEKWDFINRQLVETRQSTKALAILLKRKFPDTEIVYSKAGLSSDFRHEFGLVKSRNINDLHHAKDAFLAIVTGNVYHERFNRRWFMVNQPYSVKTKTLFTHSIKNGNFVAWNGEEDLGRIVKMLKQNKNTIHFTRFSFDRKEGLFDIQPLKASTGLVPRKAGLDVVKYGGYDKSTAAYYLLVRFTLEDKKTQHKLMMIPVEGLYKARIDHDKEFLTDYAQTTISEILQKDKQKVINIMFPMGTRHIKLNSMISIDGFYLSIGGKSSKGKSVLCHAMVPLIVPHKIECYIKAMESFARKFKENNKLRIVEKFDKITVEDNLNLYELFLQKLQHNPYNKFFSTQFDVLTNGRSTFTKLSPEEQVQTLLNILSIFKTCRSSGCDLKSINGSAQAARIMISADLTGLSKKYSDIRLVEQSASGLFVSKSQNLLEYL

SEQ ID NO: 713 - protein, 1399 aa, Olsenella uli DSM 7084
MNLRNTTDEYNIGLDMGTNSVGWAVTDKAGAIAHFKGKPTLGSRLFDAAQTAAGARIHRSQRRRYVRRRWRLDLLQSLFQDEVSKVDSEFFCRLRQSRLYVGDREKGHADYTWPIFNDSDFNEVDYYKRFPTIYHLRKWLMETDEKADIRLIYLATHNIVKHRGNFLRENNKSLSSRDANPAQAVKSLRLALNDWCSERDYECAWKGEEDDGAIDEAILNVLADGEKGRSDQAKEIAKLTGVDCGDAKQSKQCNEAIAKAIVGLKVEMKNIFGEFPAEKTSYIYLSSDEDVEAVRESCPDDSGELFQALCKLYSAYILQELLSYADPSGQTISANMVAKYKQYGRDLRLLKELTRTYAPQKYDLFFRGETYAGSSDYVVDEARGYTRYNLGTTKANYDDFQKSVKELFKGTDALQDERYQEMMVAFGEQKFLRRLKTSDNGSIYYQLHLEELHTILENQGKHYPFLLSEEDKIESLVSFRIPYYVGPLTRKNAAIGHDGKERFAWSSRKDGMEHAVITPWNWEEIIDRDKSAEDFIMRMTGDCTYLQGEPVLPKCSLLYEEFCALNEFNGAHWTVDGDDERRFDAAQRERIMCDLFRRTRSVTYNKVSDWLERKYNFTGARVRGGQGEHGFESKLGSYIFFCKDVFKTDGLDEADYTMIEQIILWSTLFEDRDILKRKIEEAYGGDRLTSEQIKVICKKRFTGWGRLSKRLLTDIKVNTDTGRKSIMDVLREGNPNNGQRSRTMVFMEVLRDEDLGFQKAIDGLNRDYFREHNNGLMDVNDLPGSPAIRRSINQAVRIVDEIASIARKEPTNIFIEVTREEDDPRKKGKRTKRRYDAIKSALEKFKKDDPSLWKELCEKAPGDMDERLSLYFMQRGKCMYSGRPIKIEELHTGKYEVDHIIPRSYIKDDSFENKVLVYREENQHKTDALLIDSSIRQKMGGYWRMLHDAKLVGDKKFRNLFRNHIDDKAMKGFVARQIVETSQMVKLVQTLFEARYPNTRIVPVKAGISHDLREAAGLVKCREANDFHHAHDAFLACRIGLFIQKRHPSVYDNPIGLARIMRDYARMQAREYKKSHCLAHTQGFIVNSFLSSGFDEETGEIFKDDWDAKAEVEGIRRVLNCRQCFISRMPVEGDTRYGGRYWGETIYSPKGKHKHEIPLKQGLDPNLYGGYSDLLYSYFLIYEASDVSSGERVLRFIGIPTSIAARMANQKRLEEYVSRLALQENLEHVRMVRKIMKKQLIEVDNCRLLVTAADAVTNATELAFSLDEMKIISTCAKCINGADPSAIDKIGNAQDSFFDNLKRRGSDRCALLFSQLKLDKLSQNFYMISSDDKSKILISILDRIRAKSNSVDLSLVGGAKHAAQMKFDFNAKLNNPASSFVLIDQSVTGMFERRTRIGL

SEQ ID NO: 714 - protein, 1389 aa, Oenococcus kitaharae DSM 17330
MARDYSVGLDIGTSSVGWAAIDNKYHLIRAKSKNLIGVRLFDSAVTAEKRRGYRTTRRRLSRRHWRLRLLNDIFAGPLTDFGDENFLARLKYSWVHPQDQSNQAHFAAGLLFDSKEQDKDFYRKYPTIYHLRLALMNDDQKHDLREVYLAIHHLVKYRGHFLIEGDVKADSAFDVHTFADAIQRYAESNNSDENLLGKIDEKKLSAALTDKHGSKSQRAETAETAFDILDLQSKKQIQAILKSVVGNQANLMAIFGLDSSAISKDEQKNYKFSFDDADIDEKIADSEALLSDTEFEFLCDLKAAFDGLTLKMLLGDDKTVSAAMVRRFNEHQKDWEYIKSHIRNAKNAGNGLYEKSKKFDGINAAYLALQSDNEDDRKKAKKIFQDEISSADIPDDVKADFLKKIDDDQFLPIQRTKNNGTIPHQLHRNELEQIIEKQGIYYPFLKDTYQENSHELNKITALINFRVPYYVGPLVEEEQKIADDGKNIPDPTNHWMVRKSNDTITPWNLSQVVDLDKSGRRFIERLTGTDTYLIGEPTLPKNSLLYQKFDVLQELNNIRVSGRRLDIRAKQDAFEHLFKVQKTVSATNLKDFLVQAGYISEDTQIEGLADVNGKNFNNALTTYNYLVSVLGREFVENPSNEELLEEITELQTVFEDKKVLRRQLDQLDGLSDHNREKLSRKHYTGWGRISKKLLTTKIVQNADKIDNQTFDVPRMNQSIIDTLYNTKMNLMEIINNAEDDFGVRAWIDKQNTTDGDEQDVYSLIDELAGPKEIKRGIVQSFRILDDITKAVGYAPKRVYLEFARKTQESHLTNSRKNQLSTLLKNAGLSELVTQVSQYDAAALQNDRLYLYFLQQGKDMYSGEKLNLDNLSNYDIDHIIPQAYTKDNSLDNRVLVSNITNRRKSDSSNYLPALIDKMRPFWSVLSKQGLLSKHKFANLTRTRDFDDMEKERFIARSLVETRQIIKNVASLIDSHFGGETKAVAIRSSLTADMRRYVDIPKNRDINDYHHAFDALLFSTVGQYTENSGLMKKGQLSDSAGNQYNRYIKEWIHAARLNAQSQRVNPFGFVVGSMRNAAPGKLNPETGEITPEENADWSIADLDYLHKVMNFRKITVTRRLKDQKGQLYDESRYPSVLHDAKSKASINFDKHKPVDLYGGFSSAKPAYAALIKFKNKFRLVNVLRQWTYSDKNSEDYILEQIRGKYPKAEMVLSHIPYGQLVKKDGALVTISSATELHNFEQLWLPLADYKLINTLLKTKEDNLVDILHNRLDLPEMTIESAFYKAFDSILSFAFNRYALHQNALVKLQAHRDDFNALNYEDKQQTLERILDALHASPASSDLKKINLSSGFGRLFSPSHFTLADTDEFIFQSVTGLFSTQKTVAQLYQETK

SEQ ID NO: 715 - protein, 1420 aa, Bifidobacterium bifidum S17
MSRKNYVDDYAISLDIGNASVGWSAFTPNYRLVRAKGHELIGVRLFDPADTAESRRMARTTRRRYSRRRWRLRLLDALFDQALSEIDPSFLARRKYSWVHPDDENNADCWYGSVLFDSNEQDKRFYEKYPTIYHLRKALMEDDSQHDIREIYLAIHHMVKYRGNFLVEGTLESSNAFKEDELLKLLGRITRYEMSEGEQNSDIEQDDENKLVAPANGQLADALCATRGSRSMRVDNALEALSAVNDLSREQRAIVKAIFAGLEGNKLDLAKIFVSKEFSSENKKILGIYFNKSDYEEKCVQIVDSGLLDDEEREFLDRMQGQYNAIALKQLLGRSTSVSDSKCASYDAHRANWNLIKLQLRTKENEKDINENYGILVGWKIDSGQRKSVRGESAYENMRKKANVFFKKMIETSDLSETDKNRLIHDIEEDKLFPIQRDSDNGVIPHQLHQNELKQIIKKQGKYYPFLLDAFEKDGKQINKIEGLLTFRVPYFVGPLVVPEDLQKSDNSENHWMVRKKKGEITPWNFDEMVDKDASGRKFIERLVGTDSYLLGEPTLPKNSLLYQEYEVLNELNNVRLSVRTGNHWNDKRRMRLGREEKTLLCQRLFMKGQTVTKRTAENLLRKEYGRTYELSGLSDESKFTSSLSTYGKMCRIFGEKYVNEHRDLMEKIVELQTVFEDKETLLHQLRQLEGISEADCALLVNTHYTGWGRLSRKLLTTKAGECKISDDFAPRKHSIIEIMRAEDRNLMEIITDKQLGFSDWIEQENLGAENGSSLMEVVDDLRVSPKVKRGIIQSIRLIDDISKAVGKRPSRIFLELADDIQPSGRTISRKSRLQDLYRNANLGKEFKGIADELNACSDKDLQDDRLFLYYTQLGKDMYTGEELDLDRLSSAYDIDHIIPQAVTQNDSIDNRVLVARAENARKTDSFTYMPQIADRMRNFWQILLDNGLISRVKFERLTRQNEFSEREKERFVQRSLVETRQIMKNVATLMRQRYGNSAAVIGLNAELTKEMHRYLGFSHKNRDINDYHHAQDALCVGIAGQFAANRGFFADGEVSDGAQNSYNQYLRDYLRGYREKLSAEDRKQGRAFGFIVGSMRSQDEQKRVNPRTGEVVWSEEDKDYLRKVMNYRKMLVTQKVGDDFGALYDETRYAATDPKGIKGIPFDGAKQDTSLYGGFSSAKPAYAVLIESKGKTRLVNVTMQEYSLLGDRPSDDELRKVLAKKKSEYAKANILLRHVPKMQLIRYGGGLMVIKSAGELNNAQQLWLPYEEYCYFDDLSQGKGSLEKDDLKKLLDSILGSVQCLYPWHRFTEEELADLHVAFDKLPEDEKKNVITGIVSALHADAKTANLSIVGMTGSWRRMNNKSGYTFSDEDEFIFQSPSGLFEKRVTVGELKRKAKKEVNSKYRTNEKRLPTLSGASQP

SEQ ID NO: 716 - protein, 1363 aa, Lactobacillus rhamnosus GG
MTKLNQPYGIGLDIGSNSIGFAVVDANSHLLRLKGETAIGARLFREGQSAADRRGSRTTRRRLSRTRWRLSFLRDFFAPHITKIDPDFFLRQKYSEISPKDKDRFKYEKRLFNDRTDAEFYEDYPSMYHLRLHLMTHTHKADPREIFLAIHHILKSRGHFLTPGAAKDFNTDKVDLEDIFPALTEAYAQVYPDLELTFDLAKADDFKAKLLDEQATPSDTQKALVNLLLSSDGEKEIVKKRKQVLTEFAKAITGLKTKFNLALGTEVDEADASNWQFSMGQLDDKWSNIETSMTDQGTEIFEQIQELYRARLLNGIVPAGMSLSQAKVADYGQHKEDLELFKTYLKKLNDHELAKTIRGLYDRYINGDDAKPFLREDFVKALTKEVTAHPNEVSEQLLNRMGQANFMLKQRTKANGAIPIQLQQRELDQIIANQSKYYDWLAAPNPVEAHRWKMPYQLDELLNFHIPYYVGPLITPKQQAESGENVFAWMVRKDPSGNITPYNFDEKVDREASANTFIQRMKTTDTYLIGEDVLPKQSLLYQKYEVLNELNNVRINNECLGTDQKQRLIREVFERHSSVTIKQVADNLVAHGDFARRPEIRGLADEKRFLSSLSTYHQLKEILHEAIDDPTKLLDIENIITWSTVFEDHTIFETKLAEIEWLDPKKINELSGIRYRGWGQFSRKLLDGLKLGNGHTVIQELMLSNHNLMQILADETLKETMTELNQDKLKTDDIEDVINDAYTSPSNKKALRQVLRVVEDIKHAANGQDPSWLFIETADGTGTAGKRTQSRQKQIQTVYANAAQELIDSAVRGELEDKIADKASFTDRLVLYFMQGGRDIYTGAPLNIDQLSHYDIDHILPQSLIKDDSLDNRVLVNATINREKNNVFASTLFAGKMKATWRKWHEAGLISGRKLRNLMLRPDEIDKFAKGFVARQLVETRQIIKLTEQIAAAQYPNTKIIAVKAGLSHQLREELDFPKNRDVNHYHHAFDAFLAARIGTYLLKRYPKLAPFFTYGEFAKVDVKKFREFNFIGALTHAKKNIIAKDTGEIVWDKERDIRELDRIYNFKRMLITHEVYFETADLFKQTIYAAKDSKERGGSKQLIPKKQGYPTQVYGGYTQESGSYNALVRVAEADTTAYQVIKISAQNASKIASANLKSREKGKQLLNEIVVKQLAKRRKNWKPSANSFKIVIPRFGMGTLFQNAKYGLFMVNSDTYYRNYQELWLSRENQKLLKKLFSIKYEKTQMNHDALQVYKAIIDQVEKFFKLYDINQFRAKLSDAIERFEKLPINTDGNKIGKTETLRQILIGLQANGTRSNVKNLGIKTDLGLLQVGSGIKLDKDTQIVYQSPSGLFKRRIPLADL

SEQ ID NO: 717 - protein, 1391 aa, Lactobacillus gasseri JV-V03
MTKIKNEYIVGLDVGTNSCGWVAMDFQNTILRMHGKTAIGSHLFDAGNSAADRRAFRTTRRRIKRRKWRLKLLEEIFDPYMTEVDPYFFARLKESGLSPLDKRKNVSSIVFPTALEDKKFYCNYPTIYHLRYDLMSEDKKFDLREIYLAIHHIVKYRGNFLYNTPVKDFEASKIDVKDSLEKLNELYERLDSEFTVELDSSNALEIEKIIRDKKVFKINKVKSIHQLLSLKTENKERTKLIKDVSKQIINAILGYKTKFETILLKNISKDEADDWEFKLTDVDADNKFENLIGDLNENEQEILLEIRNLANAITLSNIVEEGKTLSESMIDKYNKHSDDLELLKQVISDHPDRDKAKKLALAYDLYVNNRHGKLLQAKDVLGSKKTLSKEDFYKEVKKNLDDSKASQEILDTIALDSFMPKQRTNENGVIPYQLHQLELDRIIKNQGKYYPFLKEVNPVSSHLKEAPYKLDELIRFRVPYYVGPLISPNESTKNKQTKKNQNFAWMIRKEQGQITPWNFDQKVDRMASANKFIKRMTTKDTYLLGEDVLPANSLLYQKFTVLNELNNIKINGKRISVPLKEELYNNLFKKNSTVTTNKLKSYLKENYNLINVEIKGLADEKKFNSGLTTYNKLRNLKIFDQQLDDLNYDKDFERIIEWSTIFEDKAIYKDKLKTIKWLSDRQIDKLSKIRMQGWGQLSKKLLSQLTDNNGQTIIEQLWDSQNNFMQIVNQSDFKDAIAVANQNLLVNTSVEDILNEAYTSPANKKAIRQVVKVVDDIVKAASGKVPKQIAIEFTRDADDKAKISQTRANKLRKVYKELSNELASETIRNELERVAKDQKLLKDKYYLYFMQLGRDAYTGEPINIDDLGQYDIDHILPQSFIKDDSLENRVLVKKAVNNGKSDNVPVKLYGNRMAADLGMTIRHMWEKWKDQGLITKTKYNNLIIDPDKINKYESSGFIHRQLVETSQIIKLVSTILQSKYPDTEIIVVKARYNHYLRKHLNLYKSREVNDYHHAIDAYLSAICGNLLYQVYPYLRPFFVYGQYKKFSSDPKKEKIIYDKTRKYNFISQIFENKSNDIISLETKKKVFDKKDIIEKLKHAYNYKYMLVSRETETHDQEMFKMTVYPRLSRDTKKSRNLISKKKDMPTEIYGGYTNNSDAYMVIARINKKKGTEYRVFGVPMRELVNLRKAEKNGRYNAYLKQVLEPEIMYSKNGKKNKTISSFEIVKAKVPYKQVILDGDKKFMLASSTYVQNAKQLTLSQNSMQAITDNCENDTEEEKALEEKALIEAYDEILTNIDKYLPLFDINKFREKLHAGREKFINLSLDVKKDTILQVLNGLHDNAVMPKIKSLGLSTPLGFMQFSSGVPLSENAKLIYQSPTGLFEKRVKISDL

SEQ ID NO: 718 - protein, 1348 aa, Finegoldia magna ATCC 29328
MKSEKKYYIGLDVGTNSVGWAVTDEFYNILRAKGKDLWGVRLFEKADTAANTRIFRSGRRRNDRKGMRLQILREIFEDEIKKVDKDFYDRLDESKFWAEDKKVSGKYSLFNDKNFSDKQYFEKFPTIFHLRKYLMEEHGKVDIRYYFLAINQMMKRRGHFLIDGQISHVTDDKPLKEQLILLINDLLKIELEEELMDSIFEILADVNEKRTDKKNNLKELIKGQDFNKQEGNILNSIFESIVTGKAKIKNIISDEDILEKIKEDNKEDFVLTGDSYEENLQYFEEVLQENITLFNTLKSTYDFLILQSILKGKSTLSDAQVERYDEHKKDLEILKKVIKKYDEDGKLFKQVFKEDNGNGYVSYIGYYLNKNKKITAKKKISNIEFTKYVKGILEKQCDCEDEDVKYLLGKIEQENFLLKQISSINSVIPHQIHLFELDKILENLAKNYPSFNNKKEEFTKIEKIRKTFTFRIPYYVGPLNDYHKNNGGNAWIFRNKGEKIRPWNFEKIVDLHKSEEEFIKRMLNQCTYLPEETVLPKSSILYSEYMVLNELNNLRINGKPLDTDVKLKLIEELFKKKTKVTLKSIRDYMVRNNFADKEDFDNSEKNLEIASNMKSYIDFNNILEDKFDVEMVEDLIEKITIHTGNKKLLKKYIEETYPDLSSSQIQKIINLKYKDWGRLSRKLLDGIKGTKKETEKTDTVINFLRNSSDNLMQIIGSQNYSFNEYIDKLRKKYIPQEISYEVVENLYVSPSVKKMIWQVIRVTEEITKVMGYDPDKIFIEMAKSEEEKKTTISRKNKLLDLYKAIKKDERDSQYEKLLTGLNKLDDSDLRSRKLYLYYTQMGRDMYTGEKIDLDKLFDSTHYDKDHIIPQSMKKDDSIINNLVLVNKNANQTTKGNIYPVPSSIRNNPKIYNYWKYLMEKEFISKEKYNRLIRNTPLTNEELGGFINRQLVETRQSTKAIKELFEKFYQKSKIIPVKASLASDLRKDMNTLKSREVNDLHHAHDAFLNIVAGDVWNREFTSNPINYVKENREGDKVKYSLSKDFTRPRKSKGKVIWTPEKGRKLIVDTLNKPSVLISNESHVKKGELFNATIAGKKDYKKGKIYLPLKKDDRLQDVSKYGGYKAINGAFFFLVEHTKSKKRIRSIELFPLHLLSKFYEDKNTVLDYAINVLQLQDPKIIIDKINYRTEIIIDNFSYLISTKSNDGSITVKPNEQMYWRVDEISNLKKIENKYKKDAILTEEDRKIMESYIDKIYQQFKAGKYKNRRTTDTIIEKYEIIDLDTLDNKQLYQLLVAFISLSYKTSNNAVDFTVIGLGTECGKPRITNLPDNTYLVYKSITGIYEKRIRIK

SEQ ID NO: 719 - protein, 1236 aa, Mycoplasma mobile 163K
MYFYKNKENKLNKKVVLGLDLGIASVGWCLTDISQKEDNKFPIILHGVRLFETVDDSDDKLLNETRRKKRGQRRRNRRLFTRKRDFIKYLIDNNIIELEFDKNPKILVRNFIEKYINPFSKNLELKYKSVTNLPIGFHNLRKAAINEKYKLDKSELIVLLYFYLSLRGAFFDNPEDTKSKEMNKNEIEIFDKNESIKNAEFPIDKIIEFYKISGKIRSTINLKFGHQDYLKEIKQVFEKQNIDFMNYEKFAMEEKSFFSRIRNYSEGPGNEKSFSKYGLYANENGNPELIINEKGQKIYTKIFKTLWESKIGKCSYDKKLYRAPKNSFSAKVFDITNKLTDWKHKNEYISERLKRKILLSRFLNKDSKSAVEKILKEENIKFENLSEIAYNKDDNKINLPIINAYHSLTTIFKKHLINFENYLISNENDLSKLMSFYKQQSEKLFVPNEKGSYEINQNNNVLHIFDAISNILNKFSTIQDRIRILEGYFEFSNLKKDVKSSEIYSEIAKLREFSGTSSLSFGAYYKFIPNLISEGSKNYSTISYEEKALQNQKNNFSHSNLFEKTWVEDLIASPTVKRSLRQTMNLLKEIFKYSEKNNLEIEKIVVEVTRSSNNKHERKKIEGINKYRKEKYEELKKVYDLPNENTTLLKKLWLLRQQQGYDAYSLRKIEANDVINKPWNYDIDHIVPRSISFDDSFSNLVIVNKLDNAKKSNDLSAKQFIEKIYGIEKLKEAKENWGNWYLRNANGKAFNDKGKFIKLYTIDNLDEFDNSDFINRNLSDTSYITNALVNHLTFSNSKYKYSVVSVNGKQTSNLRNQIAFVGIKNNKETEREWKRPEGFKSINSNDFLIREEGKNDVKDDVLIKDRSFNGHHAEDAYFITIISQYFRSFKRIERLNVNYRKETRELDDLEKNNIKFKEKASFDNFLLINALDELNEKLNQMRFSRMVITKKNTQLFNETLYSGKYDKGKNTIKKVEKLNLLDNRTDKIKKIEEFFDEDKLKENELTKLHIFNHDKNLYETLKIIWNEVKIEIKNKNLNEKNYFKYFVNKKLQEGKISFNEWVPILDNDFKIIRKIRYIKFSSEEKETDEIIFSQSNFLKIDQRQNFSFHNTLYWVQIWVYKNQKDQYCFISIDARNSKFEKDEIKINYEKLKTQKEKLQIINEEPILKINKGDLFENEEKELFYIVGRDEKPQKLEIKYILGKKIKDQKQIQKPVKKYFPNWKKVNLTYMGEIFKK

SEQ ID NO: 720 - protein, 1269 aa, Mycoplasma gallisepticum str. F
MNNSIKSKPEVTIGLDLGVGSVGWAIVDNETNIIHHLGSRLFSQAKTAEDRRSFRGVRRLIRRRKYKLKRFVNLIWKYNSYFGFKNKEDILNNYQEQQKLHNTVLNLKSEALNAKIDPKALSWILHDYLKNRGHFYEDNRDFNVYPTKELAKYFDKYGYYKGIIDSKEDNDNKLEEELTKYKFSNKHWLEEVKKVLSNQTGLPEKFKEEYESLFSYVRNYSEGPGSINSVSPYGIYHLDEKEGKVVQKYNNIWDKTIGKCNIFPDEYRAPKNSPIAMIFNEINELSTIRSYSIYLTGWFINQEFKKAYLNKLLDLLIKTNGEKPIDARQFKKLREETIAESIGKETLKDVENEEKLEKEDHKWKLKGLKLNTNGKIQYNDLSSLAKFVHKLKQHLKLDFLLEDQYATLDKINFLQSLFVYLGKHLRYSNRVDSANLKEFSDSNKLFERILQKQKDGLFKLFEQTDKDDEKILAQTHSLSTKAMLLAITRMTNLDNDEDNQKNNDKGWNFEAIKNFDQKFIDITKKNNNLSLKQNKRYLDDRFINDAILSPGVKRILREATKVFNAILKQFSEEYDVTKVVIELARELSEEKELENTKNYKKLIKKNGDKISEGLKALGISEDEIKDILKSPTKSYKFLLWLQQDHIDPYSLKEIAFDDIFTKTEKFEIDHIIPYSISFDDSSSNKLLVLAESNQAKSNQTPYEFISSGNAGIKWEDYEAYCRKFKDGDSSLLDSTQRSKKFAKMMKTDTSSKYDIGFLARNLNDTRYATIVFRDALEDYANNHLVEDKPMFKVVCINGSVTSFLRKNFDDSSYAKKDRDKNIHHAVDASIISIFSNETKTLFNQLTQFADYKLFKNTDGSWKKIDPKTGVVTEVTDENWKQIRVRNQVSEIAKVIEKYIQDSNIERKARYSRKIENKTNISLFNDTVYSAKKVGYEDQIKRKNLKTLDIHESAKENKNSKVKRQFVYRKLVNVSLLNNDKLADLFAEKEDILMYRANPWVINLAEQIFNEYTENKKIKSQNVFEKYMLDLTKEFPEKFSEFLVKSMLRNKTAIIYDDKKNIVHRIKRLKMLSSELKENKLSNVIIRSKNQSGTKLSYQDTINSLALMIMRSIDPTAKKQYIRVPLNTLNLHLGDHDFDLHNMDAYLKKPKFVKYLKANEIGDEYKPWRVLTSGTLLIHKKDKKLMYISSFQNLNDVIEIKNLIETEYKENDDSDSKKKKKANRFLMTLSTILNDYILLDAKDNFDILGLSKNRIDEILNSKLGLDKIVK

SEQ ID NO: 721 - protein, 1265 aa, Mycoplasma ovipneumoniae SC01
MHNKKNITIGFDLGIASIGWAIIDSTTSKILDWGTRTFEERKTANERRAFRSTRRNIRRKAYRNQRFINLILKYKDLFELKNISDIQRANKKDTENYEKIISFFTEIYKKCAAKHSNILEVKVKALDSKIEKLDLIWILHDYLENRGFFYDLEEENVADKYEGIEHPSILLYDFFKKNGFFKSNSSIPKDLGGYSFSNLQWVNEIKKLFEVQEINPEFSEKFLNLFTSVRDYAKGPGSEHSASEYGIFQKDEKGKVFKKYDNIWDKTIGKCSFFVEENRSPVNYPSYEIFNLLNQLINLSTDLKTTNKKIWQLSSNDRNELLDELLKVKEKAKIISISLKKNEIKKIILKDFGFEKSDIDDQDTIEGRKIIKEEPTTKLEVTKHLLATIYSHSSDSNWININNILEFLPYLDAICIILDREKSRGQDEVLKKLTEKNIFEVLKIDREKQLDFVKSIFSNTKFNFKKIGNFSLKAIREFLPKMFEQNKNSEYLKWKDEEIRRKWEEQKSKLGKTDKKTKYLNPRIFQDEIISPGTKNTFEQAVLVLNQIIKKYSKENIIDAIIIESPREKNDKKTIEEIKKRNKKGKGKTLEKLFQILNLENKGYKLSDLETKPAKLLDRLRFYHQQDGIDLYTLDKINIDQLINGSQKYEIEHIIPYSMSYDNSQANKILTEKAENLKKGKLIASEYIKRNGDEFYNKYYEKAKELFINKYKKNKKLDSYVDLDEDSAKNRFRFLTLQDYDEFQVEFLARNLNDTRYSTKLFYHALVEHFENNEFFTYIDENSSKHKVKISTIKGHVTKYFRAKPVQKNNGPNENLNNNKPEKIEKNRENNEHHAVDAAIVAIIGNKNPQIANLLTLADNKTDKKFLLHDENYKENIETGELVKIPKFEVDKLAKVEDLKKIIQEKYEEAKKHTAIKFSRKTRTILNGGLSDETLYGFKYDEKEDKYFKIIKKKLVTSKNEELKKYFENPFGKKADGKSEYTVLMAQSHLSEFNKLKEIFEKYNGFSNKTGNAFVEYMNDLALKEPTLKAEIESAKSVEKLLYYNFKPSDQFTYHDNINNKSFKRFYKNIRIIEYKSIPIKFKILSKHDGGKSFKDTLFSLYSLVYKVYENGKESYKSIPVTSQMRNFGIDEFDFLDENLYNKEKLDIYKSDFAKPIPVNCKPVFVLKKGSILKKKSLDIDDFKETKETEEGNYYFISTISKRFNRDTAYGLKPLKLSVVKPVAEPSTNPIFKEYIPIHLDELGNEYPVKIKEHTDDEKLMCTIK

SEQ ID NO: 722 - protein, 1233 aa, Mycoplasma canis PG 14
MEKKRKVTLGFDLGIASVGWAIVDSETNQVYKLGSRLFDAPDTNLERRTQRGTRRLLRRRKYRNQKFYNLVKRTEVFGLSSREAIENRFRELSIKYPNIIELKTKALSQEVCPDEIAWILHDYLKNRGYFYDEKETKEDFDQQTVESMPSYKLNEFYKKYGYFKGALSQPTESEMKDNKDLKEAFFFDFSNKEWLKEINYFFNVQKNILSETFIEEFKKIFSFTRDISKGPGSDNMPSPYGIFGEFGDNGQGGRYEHIWDKNIGKCSIFTNEQRAPKYLPSALIFNFLNELANIRLYSTDKKNIQPLWKLSSVDKLNILLNLFNLPISEKKKKLTSTNINDIVKKESIKSIMISVEDIDMIKDEWAGKEPNVYGVGLSGLNIEESAKENKFKFQDLKILNVLINLLDNVGIKFEFKDRNDIIKNLELLDNLYLFLIYQKESNNKDSSIDLFIAKNESLNIENLKLKLKEFLLGAGNEFENHNSKTHSLSKKAIDEILPKLLDNNEGWNLEAIKNYDEEIKSQIEDNSSLMAKQDKKYLNDNFLKDAILPPNVKVTFQQAILIFNKIIQKFSKDFEIDKVVIELAREMTQDQENDALKGIAKAQKSKKSLVEERLEANNIDKSVFNDKYEKLIYKIFLWISQDFKDPYTGAQISVNEIVNNKVEIDHIIPYSLCFDDSSANKVLVHKQSNQEKSNSLPYEYIKQGHSGWNWDEFTKYVKRVFVNNVDSILSKKERLKKSENLLTASYDGYDKLGFLARNLNDTRYATILFRDQLNNYAEHHLIDNKKMFKVIAMNGAVTSFIRKNMSYDNKLRLKDRSDFSHHAYDAAIIALFSNKTKTLYNLIDPSLNGIISKRSEGYWVIEDRYTGEIKELKKEDWTSIKNNVQARKIAKEIEEYLIDLDDEVFFSRKTKRKTNRQLYNETIYGIATKTDEDGITNYYKKEKFSILDDKDIYLRLLREREKFVINQSNPEVIDQIIEIIESYGKENNIPSRDEAINIKYTKNKINYNLYLKQYMRSLTKSLDQFSEEFINQMIANKTFVLYNPTKNTTRKIKFLRLVNDVKINDIRKNQVINKFNGKNNEPKAFYENINSLGAIVFKNSANNFKTLSINTQIAIFGDKNWDIEDFKTYNMEKIEKYKEIYGIDKTYNFHSFIFPGTILLDKQNKEFYYISSIQTVRDIIEIKFLNKIEFKDENKNQDTSKTPKRLMFGIKSIMNNYEQVDISPFGINKKIFE

SEQ ID NO: 723 - protein, 1304 aa, Mycoplasma synoviae 53
MLNNVQNLWKYLLLLIFDKKIIFLFKIKVILIRRYMENNNKEKIVIGFDLGVASVGWSIVNAETKEVIDLGVRLFSEPEKADYRRAKRTTRRLLRRKKFKREKFHKLILKNAEIFGLQSRNEILNVYKDQSSKYRNILKLKINALKEEIKPSELVWILRDYLQNRGYFYKNEKLTDEFVSNSFPSKKLHEHYEKYGFFRGSVKLDNKLDNKKDKAKEKDEEEESDAKKESEELIFSNKQWINEIVKVFENQSYLTESFKEEYLKLFNYVRPFNKGPGSKNSRTAYGVFSTDIDPETNKFKDYSNIWDKTIGKCSLFEEEIRAPKNLPSALIFNLQNEICTIKNEFTEFKNWWLNAEQKSEILKFVFTELFNWKDKKYSDKKFNKNLQDKIKKYLLNFALENFNLNEEILKNRDLENDTVLGLKGVKYYEKSNATADAALEFSSLKPLYVFIKFLKEKKLDLNYLLGLENTEILYFLDSIYLAISYSSDLKERNEWFKKLLKELYPKIKNNNLEIIENVEDIFEITDQEKFESFSKTHSLSREAFNHIIPLLLSNNEGKNYESLKHSNEELKKRTEKAELKAQQNQKYLKDNFLKEALVPLSVKTSVLQAIKIFNQIIKNFGKKYEISQVVIEMARELTKPNLEKLLNNATNSNIKILKEKLDQTEKFDDFTKKKFIDKIENSVVFRNKLFLWFEQDRKDPYTQLDIKINEIEDETEIDHVIPYSKSADDSWFNKLLVKKSTNQLKKNKTVWEYYQNESDPEAKWNKFVAWAKRIYLVQKSDKESKDNSEKNSIFKNKKPNLKFKNITKKLFDPYKDLGFLARNLNDTRYATKVFRDQLNNYSKHHSKDDENKLFKVVCMNGSITSFLRKSMWRKNEEQVYRFNFWKKDRDQFFHHAVDASIIAIFSLLTKTLYNKLRVYESYDVQRREDGVYLINKETGEVKKADKDYWKDQHNFLKIRENAIEIKNVLNNVDFQNQVRYSRKANTKLNTQLFNETLYGVKEFENNFYKLEKVNLFSRKDLRKFILEDLNEESEKNKKNENGSRKRILTEKYIVDEILQILENEEFKDSKSDINALNKYMDSLPSKFSEFFSQDFINKCKKENSLILTFDAIKHNDPKKVIKIKNLKFFREDATLKNKQAVHKDSKNQIKSFYESYKCVGFIWLKNKNDLEESIFVPINSRVIHFGDKDKDIFDFDSYNKEKLLNEINLKRPENKKFNSINEIEFVKFVKPGALLLNFENQQIYYISTLESSSLRAKIKLLNKMDKGKAVSMKKITNPDEYKIIEHVNPLGINLNWTKKLENNN

SEQ ID NO: 724 - protein, 1114 aa, Eubacterium rectale ATCC 33656
MNYTEKEKLFMKYILALDIGIASVGWAILDKESETVIEAGSNIFPEASAADNQLRRDMRGAKRNNRRLKTRINDFIKLWENNNLSIPQFKSTEIVGLKVRAITEEITLDELYLILYSYLKHRGISYLEDALDDTVSGSSAYANGLKLNAKELETHYPCEIQQERLNTIGKYRGQSQIINENGEVLDLSNVFTIGAYRKEIQRVFEIQKKYHPELTDEFCDGYMLIFNRKRKYYEGPGNEKSRTDYGRFTTKLDANGNYITEDNIFEKLIGKCSVYPDELRAAAASYTAQEYNVLNDLNNLTINGRKLEENEKHEIVERIKSSNTINMRKIISDCMGENIDDFAGARIDKSGKEIFHKFEVYNKMRKALLEIGIDISNYSREELDEIGYIMTINTDKEAMMEAFQKSWIDLSDDVKQCLINMRKTNGALFNKWQSFSLKIMNELIPEMYAQPKEQMTLLTEMGVTKGTQEEFAGLKYIPVDVVSEDIFNPVVRRSVRISFKILNAVLKKYKALDTIVIEMPRDRNSEEQKKRINDSQKLNEKEMEYIEKKLAVTYGIKLSPSDFSSQKQLSLKLKLWNEQDGICLYSGKTIDPNDIINNPQLFEIDHIIPRSISFDDARSNKVLVYRSENQKKGNQTPYYYLTHSHSEWSFEQYKATVMNLSKKKEYAISRKKIQNLLYSEDITKMDVLKGFINRNINDTSYASRLVLNTIQNFFMANEADTKVKVIKGSYTHQMRCNLKLDKNRDESYSHHAVDAMLIGYSELGYEAYHKLQGEFIDFETGEILRKDMWDENMSDEVYADYLYGKKWANIRNEVVKAEKNVKYWHYVMRKSNRGLCNQTIRGTREYDGKQYKINKLDIRTKEGIKVFAKLAFSKKDSDRERLLVYLNDRRTFDDLCKIYEDYSDAANPFVQYEKETGDIIRKYSKKHNGPRIDKLKYKDGEVGACIDISHKYGFEKGSKKVILESLVPYRMDVYYKEENHSYYLVGVKQSDIKFEKGRNVIDEEAYARILVNEKMIQPGQSRADLENLGFKFKLSFYKNDIIEYEKDGKIYTERLVSRTMPKQRNYIETKPIDKAKFEKQNLVGLGKTKFIKKYRYDILGNKYSCSEEKFTSFC

SEQ ID NO: 725 - protein, 1121 aa, Streptococcus thermophilus LMD-9
MSDLVLGLDIGIGSVGVGILNKVTGEIIHKNSRIFPAAQAENNLVRRTNRQGRRLARRKKHRRVRLNRLFEESGLITDFTKISINLNPYQLRVKGLTDELSNEELFIALKNMVKHRGISYLDDASDDGNSSVGDYAQIVKENSKQLETKTPGQIQLERYQTYGQLRGDFTVEKDGKKHRLINVFPTSAYRSEALRILQTQQEFNPQITDEFINRYLEILTGKRKYYHGPGNEKSRTDYGRYRTSGETLDNIFGILIGKCTFYPDEFRAAKASYTAQEFNLLNDLNNLTVPTETKKLSKEQKNQIINYVKNEKAMGPAKLFKYIAKLLSCDVADIKGYRIDKSGKAEIHTFEAYRKMKTLETLDIEQMDRETLDKLAYVLTLNTEREGIQEALEHEFADGSFSQKQVDELVQFRKANSSIFGKGWHNFSVKLMMELIPELYETSEEQMTILTRLGKQKTTSSSNKTKYIDEKLLTEEIYNPVVAKSVRQAIKIVNAAIKEYGDFDNIVIEMARETNEDDEKKAIQKIQKANKDEKDAAMLKAANQYNGKAELPHSVFHGHKQLATKIRLWHQQGERCLYTGKTISIHDLINNSNQFEVDHILPLSITFDDSLANKVLVYATANQEKGQRTPYQALDSMDDAWSFRELKAFVRESKTLSNKKKEYLLTEEDISKFDVRKKFIERNLVDTRYASRVVLNALQEHFRAHKIDTKVSVVRGQFTSQLRRHWGIEKTRDTYHHHAVDALIIAASSQLNLWKKQKNTLVSYSEDQLLDIETGELISDDEYKESVFKAPYQHFVDTLKSKEFEDSILFSYQVDSKFNRKISDATIYATRQAKVGKDKADETYVLGKIKDIYTQDGYDAFMKIYKKDKSKFLMYRHDPQTFEKVIEPILENYPNKQINEKGKEVPCNPFLKYKEEHGYIRKYSKKGNGPEIKSLKYYDSKLGNHIDITPKDSNNKVVLQSVSPWRADVYFNKTTGKYEILGLKYADLQFEKGTGTYKISQEKYNDIKKKEGVDSDSEFKFTLYKNDLLLVKDTETKEQQLFRFLSRTMPKQKHYVELKPYDKQKFEGGEALIKVLGNVANSGQCKKGLGKSNISIYKVRTDVLGNQHIIKNEGDKPKLDF

SEQ ID NO: 726 - protein, 1150 aa, Enterococcus faecalis TX0012
MYSIGLDLGISSVGWSVIDERTGNVIDLGVRLFSAKNSEKNLERRTNRGGRRLIRRKTNRLKDAKKILAAVGFYEDKSLKNSCPYQLRVKGLTEPLSRGEIYKVTLHILKKRGISYLDEVDTEAAKESQDYKEQVRKNAQLLTKYTPGQIQLQRLKENNRVKTGINAQGNYQLNVFKVSAYANELATILKTQQAFYPNELTDDWIALFVQPGIAEEAGLIYRKRPYYHGPGNEANNSPYGRWSDFQKTGEPATNIFDKLIGKDFQGELRASGLSLSAQQYNLLNDLTNLKIDGEVPLSSEQKEYILTELMTKEFTRFGVNDVVKLLGVKKERLSGWRLDKKGKPEIHTLKGYRNWRKIFAEAGIDLATLPTETIDCLAKVLTLNTEREGIENTLAFELPELSESVKLLVLDRYKELSQSISTQSWHRFSLKTLHLLIPELMNATSEQNTLLEQFQLKSDVRKRYSEYKKLPTKDVLAEIYNPTVNKTVSQAFKVIDALLVKYGKEQIRYITIEMPRDDNEEDEKKRIKELHAKNSQRKNDSQSYFMQKSGWSQEKFQTTIQKNRRFLAKLLYYYEQDGICAYTGLPISPELLVSDSTEIDHIIPISISLDDSINNKVLVLSKANQVKGQQTPYDAWMDGSFKKINGKFSNWDDYQKWVESRHFSHKKENNLLETRNIFDSEQVEKFLARNLNDTRYASRLVLNTLQSFFTNQETKVRVVNGSFTHTLRKKWGADLDKTRETHHHHAVDATLCAVTSFVKVSRYHYAVKEETGEKVMREIDFETGEIVNEMSYWEFKKSKKYERKTYQVKWPNFREQLKPVNLHPRIKFSHQVDRKANRKLSDATIYSVREKTEVKTLKSGKQKITTDEYTIGKIKDIYTLDGWEAFKKKQDKLLMKDLDEKTYERLLSIAETTPDFQEVEEKNGKVKRVKRSPFAVYCEENDIPAIQKYAKKNNGPLIRSLKYYDGKLNKHINITKDSQGRPVEKTKNGRKVTLQSLKPYRYDIYQDLETKAYYTVQLYYSDLRFVEGKYGITEKEYMKKVAEQTKGQVVRFCFSLQKNDGLEIEWKDSQRYDVRFYNFQSANSINFKGLEQEMMPAENQFKQKPYNNGAINLNIAKYGKEGKKLRKFNTDILGKKHYLFYEKEPKNIIK

SEQ ID NO: 727 - protein, 1054 aa, Staphylococcus lugdunensis M23590
MNQKFILGLDIGITSVGYGLIDYETKNIIDAGVRLFPEANVENNEGRRSKRGSRRLKRRRIHRLERVKKLLEDYNLLDQSQIPQSTNPYAIRVKGLSEALSKDELVIALLHIAKRRGIHKIDVIDSNDDVGNELSTKEQLNKNSKLLKDKFVCQIQLERMNEGQVRGEKNRFKTADIIKEIIQLLNVQKNFHQLDENFINKYIELVEMRREYFEGPGKGSPYGWEGDPKAWYETLMGHCTYFPDELRSVKYAYSADLFNALNDLNNLVIQRDGLSKLEYHEKYHIIENVFKQKKKPTLKQIANEINVNPEDIKGYRITKSGKPQFTEFKLYHDLKSVLFDQSILENEDVLDQIAEILTIYQDKDSIKSKLTELDILLNEEDKENIAQLTGYTGTHRLSLKCIRLVLEEQWYSSRNQMEIFTHLNIKPKKINLTAANKIPKAMIDEFILSPVVKRTFGQAINLINKIIEKYGVPEDIIIELARENNSKDKQKFINEMQKKNENTRKRINEIIGKYGNQNAKRLVEKIRLHDEQEGKCLYSLESIPLEDLLNNPNHYEVDHIIPRSVSFDNSYHNKVLVKQSENSKKSNLTPYQYFNSGKSKLSYNQFKQHILNLSKSQDRISKKKKEYLLEERDINKFEVQKEFINRNLVDTRYATRELTNYLKAYFSANNMNVKVKTINGSFTDYLRKVWKFKKERNHGYKHHAEDALIIANADFLFKENKKLKAVNSVLEKPEIESKQLDIQVDSEDNYSEMFIIPKQVQDIKDFRNFKYSHRVDKKPNRQLINDTLYSTRKKDNSTYIVQTIKDIYAKDNTTLKKQFDKSPEKFLMYQHDPRTFEKLEVIMKQYANEKNPLAKYHEETGEYLTKYSKKNNGPIVKSLKYIGNKLGSHLDVTHQFKSSTKKLVKLSIKPYRFDVYLTDKGYKFITISYLDVLKKDNYYYIPEQKYDKLKLGKAIDKNAKFIASFYKNDLIKLDGEIYKIIGVNSDTRNMIELDLPDIRYKEYCELNNIKGEPRIKKTIGKKVNSIEKLTTDVLGNVFTNTQYTKPQLLFKRGN

SEQ ID NO: 728 - protein, 1096 aa, Eubacterium dolichum DSM 3991
MMEVFMGRLVLGLDIGITSVGFGIIDLDESEIVDYGVRLFKEGTAAENETRRTKRGGRRLKRRRVTRREDMLHLLKQAGIISTSFHPLNNPYDVRVKGLNERLNGEELATALLHLCKHRGSSVETIEDDEAKAKEAGETKKVLSMNDQLLKSGKYVCEIQKERLRTNGHIRGHENNFKTRAYVDEAFQILSHQDLSNELKSAIITIISRKRMYYDGPGGPLSPTPYGRYTYFGQKEPIDLIEKMRGKCSLFPNEPRAPKLAYSAELFNLLNDLNNLSIEGEKLTSEQKAMILKIVHEKGKITPKQLAKEVGVSLEQIRGFRIDTKGSPLLSELTGYKMIREVLEKSNDEHLEDHVFYDEIAEILTKTKDIEGRKKQISELSSDLNEESVHQLAGLTKFTAYHSLSFKALRLINEEMLKTELNQMQSITLFGLKQNNELSVKGMKNIQADDTAILSPVAKRAQRETFKVVNRLREIYGEFDSIVVEMAREKNSEEQRKAIRERQKFFEMRNKQVADIIGDDRKINAKLREKLVLYQEQDGKTAYSLEPIDLKLLIDDPNAYEVDHIIPISISLDDSITNKVLVTHRENQEKGNLTPISAFVKGRFTKGSLAQYKAYCLKLKEKNIKTNKGYRKKVEQYLLNENDIYKYDIQKEFINRNLVDTSYASRVVLNTLTTYFKQNEIPTKVFTVKGSLTNAFRRKINLKKDRDEDYGHHAIDALIIASMPKMRLLSTIFSRYKIEDIYDESTGEVFSSGDDSMYYDDRYFAFIASLKAIKVRKFSHKIDTKPNRSVADETIYSTRVIDGKEKVVKKYKDIYDPKFTALAEDILNNAYQEKYLMALHDPQTFDQIVKVVNYYFEEMSKSEKYFTKDKKGRIKISGMNPLSLYRDEHGMLKKYSKKGDGPAITQMKYFDGVLGNHIDISAHYQVRDKKVVLQQISPYRTDFYYSKENGYKFVTIRYKDVRWSEKKKKYVIDQQDYAMKKAEKKIDDTYEFQFSMHRDELIGITKAEGEALIYPDETWHNFNFFFHAGETPEILKFTATNNDKSNKIEVKPIHCYCKMRLMPTISKKIVRIDKYATDVVGNLYKVKKNTLKFEFD

SEQ ID NO: 729 - protein, 1119 aa, Lactobacillus coryniformis subsp. torquens KCTC 3535
MGYRIGLDVGITSTGYAVLKTDKNGLPYKILTLDSVIYPRAENPQTGASLAEPRRIKRGLRRRTRRTKFRKQRTQQLFIHSGLLSKPEIEQILATPQAKYSVYELRVAGLDRRLTNSELFRVLYFFIGHRGFKSNRKAELNPENEADKKQMGQLLNSIEEIRKAIAEKGYRTVGELYLKDPKYNDHKRNKGYIDGYLSTPNRQMLVDEIKQILDKQRELGNEKLTDEFYATYLLGDENRAGIFQAQRDFDEGPGAGPYAGDQIKKMVGKDIFEPTEDRAAKATYTFQYFNLLQKMTSLNYQNTTGDTWHTLNGLDRQAIIDAVFAKAEKPTKTYKPTDFGELRKLLKLPDDARFNLVNYGSLQTQKEIETVEKKTRFVDFKAYHDLVKVLPEEMWQSRQLLDHIGTALTLYSSDKRRRRYFAEELNLPAELIEKLLPLNFSKFGHLSIKSMQNIIPYLEMGQVYSEATTNTGYDFRKKQISKDTIREEITNPVVRRAVTKTIKIVEQIIRRYGKPDGINIELARELGRNFKERGDIQKRQDKNRQTNDKIAAELTELGIPVNGQNIIRYKLHKEQNGVDPYTGDQIPFERAFSEGYEVDHIIPYSISWDDSYTNKVLTSAKCNREKGNRIPMVYLANNEQRLNALTNIADNIIRNSRKRQKLLKQKLSDEELKDWKQRNINDTRFITRVLYNYFRQAIEFNPELEKKQRVLPLNGEVTSKIRSRWGFLKVREDGDLHHAIDATVIAAITPKFIQQVTKYSQHQEVKNNQALWHDAEIKDAEYAAEAQRMDADLFNKIFNGFPLPWPEFLDELLARISDNPVEMMKSRSWNTYTPIEIAKLKPVFVVRLANHKISGPAHLDTIRSAKLFDEKGIVLSRVSITKLKINKKGQVATGDGIYDPENSNNGDKVVYSAIRQALEAHNGSGELAFPDGYLEYVDHGTKKLVRKVRVAKKVSLPVRLKNKAAADNGSMVRIDVFNTGKKFVFVPIYIKDTVEQVLPNKAIARGKSLWYQITESDQFCFSLYPGDMVHIESKTGIKPKYSNKENNTSVVPIKNFYGYFDGADIATASILVRAHDSSYTARSIGIAGLLKFEKYQVDYFGRYHKVHEKKRQLFVKRDE

SEQ ID NO: 730 - protein, 1092 aa, Ilyobacter polytropus DSM 2926
MKYSIGLDIGIASVGWSVINKDKERIEDMGVRIFQKAENPKDGSSLASSRREKRGSRRRNRRKKHRLDRIKNILCESGLVKKNEIEKIYKNAYLKSPWELRAKSLEAKISNKEIAQILLHIAKRRGFKSFRKTDRNADDTGKLLSGIQENKKIMEEKGYLTIGDMVAKDPKFNTHVRNKAGSYLFSFSRKLLEDEVRKIQAKQKELGNTHFTDDVLEKYIEVFNSQRNFDEGPSKPSPYYSEIGQIAKMIGNCTFESSEKRTAKNTWSGERFVFLQKLNNFRIVGLSGKRPLTEEERDIVEKEVYLKKEVRYEKLRKILYLKEEERFGDLNYSKDEKQDKKTEKTKFISLIGNYTIKKLNLSEKLKSEIEEDKSKLDKIIEILTFNKSDKTIESNLKKLELSREDIEILLSEEFSGTLNLSLKAIKKILPYLEKGLSYNEACEKADYDYKNNGIKFKRGELLPVVDKDLIANPVVLRAISQTRKVVNAIIRKYGTPHTIHVEVARDLAKSYDDRQTIIKENKKRELENEKTKKFISEEFGIKNVKGKLLLKYRLYQEQEGRCAYSRKELSLSEVILDESMTDIDHIIPYSRSMDDSYSNKVLVLSGENRKKSNLLPKEYFDRQGRDWDTFVLNVKAMKIHPRKKSNLLKEKFTREDNKDWKSRALNDTRYISRFVANYLENALEYRDDSPKKRVFMIPGQLTAQLRARWRLNKVRENGDLHHALDAAVVAVTDQKAINNISNISRYKELKNCKDVIPSIEYHADEETGEVYFEEVKDTRFPMPWSGFDLELQKRLESENPREEFYNLLSDKRYLGWFNYEEGFIEKLRPVFVSRMPNRGVKGQAHQETIRSSKKISNQIAVSKKPLNSIKLKDLEKMQGRDTDRKLYEALKNRLEEYDDKPEKAFAEPFYKPTNSGKRGPLVRGIKVEEKQNVGVYVNGGQASNGSMVRIDVFRKNGKFYTVPIYVHQTLLKELPNRAINGKPYKDWDLIDGSFEFLYSFYPNDLIEIEFGKSKSIKNDNKLTKTEIPEVNLSEVLGYYRGMDTSTGAATIDTQDGKIQMRIGIKTVKNIKKYQVDVLGNVYKVKREKRQTF

SEQ ID NO: 731 - protein, 1156 aa, Ruminococcus albus 8
MGNYYLGLDVGIGSIGWAVINIEKKRIEDFNVRIFKSGEIQEKNRNSRASQQCRRSRGLRRLYRRKSHRKLRLKNYLSIIGLTTSEKIDYYYETADNNVIQLRNKGLSEKLTPEEIAACLIHICNNRGYKDFYEVNVEDIEDPDERNEYKEEHDSIVLISNLMNEGGYCTPAEMICNCREFDEPNSVYRKFHNSAASKNHYLITRHMLVKEVDLILENQSKYYGILDDKTIAKIKDIIFAQRDFEIGPGKNERFRRFTGYLDSIGKCQFFKDQERGSRFTVIADIYAFVNVLSQYTYTNNRGESVFDTSFANDLINSALKNGSMDKRELKAIAKSYHIDISDKNSDTSLTKCFKYIKVVKPLFEKYGYDWDKLIENYTDTDNNVLNRIGIVLSQAQTPKRRREKLKALNIGLDDGLINELTKLKLSGTANVSYKYMQGSIEAFCEGDLYGKYQAKFNKEIPDIDENAKPQKLPPFKNEDDCEFFKNPVVFRSINETRKLINAIIDKYGYPAAVNIETADELNKTFEDRAIDTKRNNDNQKENDRIVKEIIECIKCDEVHARHLIEKYKLWEAQEGKCLYSGETITKEDMLRDKDKLFEVDHIVPYSLILDNTINNKALVYAEENQKKGQRTPLMYMNEAQAADYRVRVNTMFKSKKCSKKKYQYLMLPDLNDQELLGGWRSRNLNDTRYICKYLVNYLRKNLRFDRSYESSDEDDLKIRDHYRVFPVKSRFTSMFRRWWLNEKTWGRYDKAELKKLTYLDHAADAIIIANCRPEYVVLAGEKLKLNKMYHQAGKRITPEYEQSKKACIDNLYKLFRMDRRTAEKLLSGHGRLTPIIPNLSEEVDKRLWDKNIYEQFWKDDKDKKSCEELYRENVASLYKGDPKFASSLSMPVISLKPDHKYRGTITGEEAIRVKEIDGKLIKLKRKSISEITAESINSIYTDDKILIDSLKTIFEQADYKDVGDYLKKTNQHFFTTSSGKRVNKVTVIEKVPSRWLRKEIDDNNFSLLNDSSYYCIELYKDSKGDNNLQGIAMSDIVHDRKTKKLYLKPDFNYPDDYYTHVMYIFPGDYLRIKSTSKKSGEQLKFEGYFISVKNVNENSFRFISDNKPCAKDKRVSITKKDIVIKLAVDLMGKVQGENNGKGISCGEPLSLLKEKN

SEQ ID NO: 732 - protein, 1101 aa, Akkermansia muciniphila ATCC BAA-835
MSRSLTFSFDIGYASIGWAVIASASHDDADPSVCGCGTVLFPKDDCQAFKRREYRRLRRNIRSRRVRIERIGRLLVQAQIITPEMKETSGHPAPFYLASEALKGHRTLAPIELWHVLRWYAHNRGYDNNASWSNSLSEDGGNGEDTERVKHAQDLMDKHGTATMAETICRELKLEEGKADAPMEVSTPAYKNLNTAFPRLIVEKEVRRILELSAPLIPGLTAEIIELIAQHHPLTTEQRGVLLQHGIKLARRYRGSLLFGQLIPRFDNRIISRCPVTWAQVYEAELKKGNSEQSARERAEKLSKVPTANCPEFYEYRMARILCNIRADGEPLSAEIRRELMNQARQEGKLTKASLEKAISSRLGKETETNVSNYFTLHPDSEEALYLNPAVEVLQRSGIGQILSPSVYRIAANRLRRGKSVTPNYLLNLLKSRGESGEALEKKIEKESKKKEADYADTPLKPKYATGRAPYARTVLKKVVEEILDGEDPTRPARGEAHPDGELKAHDGCLYCLLDTDSSVNQHQKERRLDTMTNNHLVRHRMLILDRLLKDLIQDFADGQKDRISRVCVEVGKELTTFSAMDSKKIQRELTLRQKSHTDAVNRLKRKLPGKALSANLIRKCRIAMDMNWTCPFTGATYGDHELENLELEHIVPHSFRQSNALSSLVLTWPGVNRMKGQRTGYDFVEQEQENPVPDKPNLHICSLNNYRELVEKLDDKKGHEDDRRRKKKRKALLMVRGLSHKHQSQNHEAMKEIGMTEGMMTQSSHLMKLACKSIKTSLPDAHIDMIPGAVTAEVRKAWDVFGVFKELCPEAADPDSGKILKENLRSLTHLHHALDACVLGLIPYIIPAHHNGLLRRVLAMRRIPEKLIPQVRPVANQRHYVLNDDGRMMLRDLSASLKENIREQLMEQRVIQHVPADMGGALLKETMQRVLSVDGSGEDAMVSLSKKKDGKKEKNQVKASKLVGVFPEGPSKLKALKAAIEIDGNYGVALDPKPVVIRHIKVFKRIMALKEQNGGKPVRILKKGMLIHLTSSKDPKHAGVWRIESIQDSKGGVKLDLQRAHCAVPKNKTHECNWREVDLISLLKKYQMKRYPTSYTGTPR

SEQ ID NO: 733 - protein, 1138 aa, Acidothermus cellulolyticus 11B
MGGSEVGTVPVTWRLGVDVGERSIGLAAVSYEEDKPKEILAAVSWIHDGGVGDERSGASRLALRGMARRARRLRRFRRARLRDLDMLLSELGWTPLPDKNVSPVDAWLARKRLAEEYVVDETERRRLLGYAVSHMARHRGWRNPWTTIKDLKNLPQPSDSWERTRESLEARYSVSLEPGTVGQWAGYLLQRAPGIRLNPTQQSAGRRAELSNATAFETRLRQEDVLWELRCIADVQGLPEDVVSNVIDAVFCQKRPSVPAERIGRDPLDPSQLRASRACLEFQEYRIVAAVANLRIRDGSGSRPLSLEERNAVIEALLAQTERSLTWSDIALEILKLPNESDLTSVPEEDGPSSLAYSQFAPFDETSARIAEFIAKNRRKIPTFAQWWQEQDRTSRSDLVAALADNSIAGEEEQELLVHLPDAELEALEGLALPSGRVAYSRLTLSGLTRVMRDDGVDVHNARKTCFGVDDNWRPPLPALHEATGHPVVDRNLAILRKFLSSATMRWGPPQSIVVELARGASESRERQAEEEAARRAHRKANDRIRAELRASGLSDPSPADLVRARLLELYDCHCMYCGAPISWENSELDHIVPRTDGGSNRHENLAITCGACNKEKGRRPFASWAETSNRVQLRDVIDRVQKLKYSGNMYWTRDEFSRYKKSVVARLKRRTSDPEVIQSIESTGYAAVALRDRLLSYGEKNGVAQVAVFRGGVTAEARRWLDISIERLFSRVAIFAQSTSTKRLDRRHHAVDAVVLTTLTPGVAKTLADARSRRVSAEFWRRPSDVNRHSTEEPQSPAYRQWKESCSGLGDLLISTAARDSIAVAAPLRLRPTGALHEETLRAFSEHTVGAAWKGAELRRIVEPEVYAAFLALTDPGGRFLKVSPSEDVLPADENRHIVLSDRVLGPRDRVKLFPDDRGSIRVRGGAAYIASFHHARVFRWGSSHSPSFALLRVSLADLAVAGLLRDGVDVFTAELPPWTPAWRYASIALVKAVESGDAKQVGWLVPGDELDFGPEGVTTAAGDLSMFLKYFPERHWVVTGFEDDKRINLKPAFLSAEQAEVLRTERSDRPDTLTEAGEILAQFFPRCWRATVAKVLCHPGLTVIRRTALGQPRWRRGHLPYSWRPWSADPWSGGTP

SEQ ID NO: 734 - protein, 1187 aa, Bifidobacterium longum DJO10A
MLSRQLLGASHLARPVSYSYNVQDNDVHCSYGERCFMRGKRYRIGIDVGLNSVGLAAVEVSDENSPVRLLNAQSVIHDGGVDPQKNKEAITRKNMSGVARRTRRMRRRKRERLHKLDMLLGKFGYPVIEPESLDKPFEEWHVRAELATRYIEDDELRRESISIALRHMARHRGWRNPYRQVDSLISDNPYSKQYGELKEKAKAYNDDATAAEEESTPAQLVVAMLDAGYAEAPRLRWRTGSKKPDAEGYLPVRLMQEDNANELKQIFRVQRVPADEWKPLFRSVFYAVSPKGSAEQRVGQDPLAPEQARALKASLAFQEYRIANVITNLRIKDASAELRKLTVDEKQSIYDQLVSPSSEDITWSDLCDFLGFKRSQLKGVGSLTEDGEERISSRPPRLTSVQRIYESDNKIRKPLVAWWKSASDNEHEAMIRLLSNTVDIDKVREDVAYASAIEFIDGLDDDALTKLDSVDLPSGRAAYSVETLQKLTRQMLTTDDDLHEARKTLFNVTDSWRPPADPIGEPLGNPSVDRVLKNVNRYLMNCQQRWGNPVSVNIEHVRSSFSSVAFARKDKREYEKNNEKRSIFRSSLSEQLRADEQMEKVRESDLRRLEAIQRQNGQCLYCGRTITFRTCEMDHIVPRKGVGSTNTRTNFAAVCAECNRMKSNTPFAIWARSEDAQTRGVSLAEAKKRVTMFTFNPKSYAPREVKAFKQAVIARLQQTEDDAAIDNRSIESVAWMADELHRRIDWYFNAKQYVNSASIDDAEAETMKTTVSVFQGRVTASARRAAGIEGKIHFIGQQSKTRLDRRHHAVDASVIAMMNTAAAQTLMERESLRESQRLIGLMPGERSWKEYPYEGTSRYESFHLWLDNMDVLLELLNDALDNDRIAVMQSQRYVLGNSIAHDATIHPLEKVPLGSAMSADLIRRASTPALWCALTRLPDYDEKEGLPEDSHREIRVHDTRYSADDEMGFFASQAAQIAVQEGSADIGSAIHHARVYRCWKTNAKGVRKYFYGMIRVFQTDLLRACHDDLFTVPLPPQSISMRYGEPRVVQALQSGNAQYLGSLVVGDEIEMDFSSLDVDGQIGEYLQFFSQFSGGNLAWKHWVVDGFFNQTQLRIRPRYLAAEGLAKAFSDDVVPDGVQKIVTKQGWLPPVNTASKTAVRIVRRNAFGEPRLSSAHHMPCSWQWRHE

SEQ ID NO: 735 - protein, 1138 aa, Bifidobacterium dentium Bd1
MLCRCHRRYRIGIDVGLMSVGLAAIEVDETGFPIRILNIQSVIHDGGIDPQLGKKKSISRKAISGVARRTRRMRRRKVVRLRQLDATLESLGFPIVEPDSLDTWEIWLTRAKLASSYIQDDETRKEDVSIALRHIARHRGWRNPYSNVESLFVDVAPSEQYEELRRKAEEKLGTSLSGNPTSAEIVECILKRQVGEVQLRTRSRKGVNGNAVEKEGLLPTKLMQSDNAAEIRRIFKVQRIDDETGRKLLRAVFKACSPKGSVERRVGRDALAPGLPRALKASLAFQEYRIANVLTNLVISEDGTKRKLTIAEKQRVFGFLSSNETDDITWIDVAEKLGLERRQIQGVGCLTADGEERISSTPPRNITALHIHSAKPVIREKLVAWWKAASPTVRETMVELLSNTVDIDRVREDMDYSSAVAFIDSLGDEELTALDSVDLLSGRAAYSRQTLKQLTERMLNTDDDLHEARKAVFGVDDNWKPPVDAISTSVGNPAVDRVLKIVNRYLLACQKRWRNPQSVQIEHVRESFSSVAKAKETERVQGERARYRNDLRRELCEQEGLNKIRESDIRRWESVQRQNGTCLYCGSPITFRTCEMDHIVPRKGVGSTNTRVNLAAACAACNKLKSNTAFSVWARTEGAANRKVSQRDAIERVKTFIFNKSVPPREQRAFKQAVISRLRQAESDPAIDNRSIESVAWMADELHRRIEAYFNQDADVSGNTPATQVWVFQGRVTALARKASGIEGRIHFAGEWKKTRLDRRHHAVDAAVIAMMNHSAAQTLVERDSLRLSQWITRKPETWKNYPFSEGQKKTRFKEWLDCMNALLDLLNDALDSDRVPVTRCQRMSLGNSQAHAATIRKMKRVELFSPMDADLIRRASTPALYCALTRLPEYSPEKGLPENRGREIVLNGRHIRSTETVDFFASGAAQLMVRNGSAEIGDSIHHMRIYRYRKTGAKSQEYVYGMIRVFQIDLLHASSENLFAVQLPSQSVSVRYGDKNVVQAIQEGRAEYLGHIVPNDEILISYEGVRMKDSEKIGAYANDFSGTASELAQRRHWVVVGSDVSKLALRPSYLSEEGLENSGSESERLSKQTRKVIEGKGWVVAVNILAKYHPVVIRRNALGEPRFRTNSGMPVSWRWDR

SEQ ID NO: 736 - protein, 1084 aa, Corynebacterium diphtheriae NCTC 13129
MKYHVGIDVGTFSVGLAAIEVDDAGMPIKTLSLVSHIHDSGLDPDEIKSAVTRLASSGIARRTRRLYRRKRRRLQQLDKFIQRQGWPVIELEDYSDPLYPWKVRAELAASYIADEKERGEKLSVALRHIARHRGWRNPYAKVSSLYLPDGPSDAFKAIREEIKRASGQPVPETATVGQMVTLCELGTLKLRGEGGVLSARLQQSDYAREIQEICRMQEIGQELYRKIIDVVFAAESPKGSASSRVGKDPLQPGKNRALKASDAFQRYRIAALIGNLRVRVDGEKRILSVEEKNLVFDHLVNLTPKKEPEWVTIAEILGIDRGQLIGTATMTDDGERAGARPPTHDTNRSIVNSRIAPLVDWWKTASALEQHAMVKALSNAEVDDFDSPEGAKVQAFFADLDDDVHAKLDSLHLPVGRAAYSEDTLVRLTRRMLSDGVDLYTARLQEFGIEPSWTPPTPRIGEPVGNPAVDRVLKTVSRWLESATKTWGAPERVIIEHVREGFVTEKRAREMDGDMRRRAARNAKLFQEMQEKLNVQGKPSRADLWRYQSVQRQNCQCAYCGSPITFSNSEMDHIVPRAGQGSTNTRENLVAVCHRCNQSKGNTPFAIWAKNTSIEGVSVKEAVERTRHWVTDTGMRSTDFKKFTKAVVERFQRATMDEEIDARSMESVAWMANELRSRVAQHFASHGTTVRVYRGSLTAEARRASGISGKLKFFDGVGKSRLDRRHHAIDAAVIAFTSDYVAETLAVRSNLKQSQAHRQEAPQWREFTGKDAEHRAAWRVWCQKMEKLSALLTEDLRDDRVVVMSNVRLRLGNGSAHKETIGKLSKVKLSSQLSVSDIDKASSEALWCALTREPGFDPKEGLPANPERHIRVNGTHVYAGDNIGLFPVSAGSIALRGGYAELGSSFHHARVYKITSGKKPAFAMLRVYTIDLLPYRNQDLFSVELKPQTMSMRQAEKKLRDALATGNAEYLGWLVVDDELVVDTSKIATDQVKAVEAELGTIRRWRVDGFFSPSKLRLRPLQMSKEGIKKESAPELSKIIDRPGWLPAVNKLFSDGNVTVVRRDSLGRVRLESTAHLPVTWKVQ

SEQ ID NO: 737 - protein, 1195 aa, Elusimicrobium minutum Pei191
MQKNINTKQNHIYIKQAQKIKEKLGDKPYRIGLDLGVGSIGFAIVSMEENDGNVLLPKEIIMVGSRIFKASAGAADRKLSRGQRNNHRHTRERMRYLWKVLAEQKLALPVPADLDRKENSSEGETSAKRFLGDVLQKDIYELRVKSLDERLSLQELGYVLYHIAGHRGSSAIRTFENDSEEAQKENTENKKIAGNIKRLMAKKNYRTYGEYLYKEFFENKEKHKREKISNAANNHKFSPTRDLVIKEAEAILKKQAGKDGFHKELTEEYIEKLTKAIGYESEKLIPESGFCPYLKDEKRLPASHKLNEERRLWETLNNARYSDPIVDIVTGEITGYYEKQFTKEQKQKLFDYLLTGSELTPAQTKKLLGLKNTNFEDIILQGRDKKAQKIKGYKLIKLESMPFWARLSEAQQDSFLYDWNSCPDEKLLTEKLSNEYHLTEEEIDNAFNEIVLSSSYAPLGKSAMLIILEKIKNDLSYTEAVEEALKEGKLTKEKQAIKDRLPYYGAVLQESTQKIIAKGFSPQFKDKGYKTPHTNKYELEYGRIANPVVHQTLNELRKLVNEIIDILGKKPCEIGLETARELKKSAEDRSKLSREQNDNESNRNRIYEIYIRPQQQVIITRRENPRNYILKFELLEEQKSQCPFCGGQISPNDIINNQADIEHLFPIAESEDNGRNNLVISHSACNADKAKRSPWAAFASAAKDSKYDYNRILSNVKENIPHKAWRFNQGAFEKFIENKPMAARFKTDNSYISKVAHKYLACLFEKPNIICVKGSLTAQLRMAWGLQGLMIPFAKQLITEKESESFNKDVNSNKKIRLDNRHHALDAIVIAYASRGYGNLLNKMAGKDYKINYSERNWLSKILLPPNNIVWENIDADLESFESSVKTALKNAFISVKHDHSDNGELVKGTMYKIFYSERGYTLTTYKKLSALKLTDPQKKKTPKDFLETALLKFKGRESEMKNEKIKSAIENNKRLFDVIQDNLEKAKKLLEEENEKSKAEGKKEKNINDASIYQKAISLSGDKYVQLSKKEPGKFFAISKPTPTTTGYGYDTGDSLCVDLYYDNKGKLCGEIIRKIDAQQKNPLKYKEQGFTLFERIYGGDILEVDFDIHSDKNSFRNNTGSAPENRVFIKVGTFTEITNNNIQIWFGNIIKSTGGQDDSFTINSMQQYNPRKLILSSCGFIKYRSPILKNKEG

SEQ ID NO: 738 - protein, 1132 aa, Nitratifractor salsuginis DSM 16511
MKKILGVDLGITSFGYAILQETGKDLYRCLDNSVVMRNNPYDEKSGESSQSIRSTQKSMRRLIEKRKKRIRCVAQTMERYGILDYSETMKINDPKNNPIKNRWQLRAVDAWKRPLSPQELFAIFAHMAKHRGYKSIATEDLIYELELELGLNDPEKESEKKADERRQVYNALRHLEELRKKYGGETIAQTIHRAVEAGDLRSYRNHDDYEKMIRREDIEEEIEKVLLRQAELGALGLPEEQVSELIDELKACITDQEMPTIDESLFGKCTFYKDELAAPAYSYLYDLYRLYKKLADLNIDGYEVTQEDREKVIEWVEKKIAQGKNLKKITHKDLRKILGLAPEQKIFGVEDERIVKGKKEPRTFVPFFFLADIAKFKELFASIQKHPDALQIFRELAEILQRSKTPQEALDRLRALMAGKGIDTDDRELLELFKNKRSGTRELSHRYILEALPLFLEGYDEKEVQRILGFDDREDYSRYPKSLRHLHLREGNLFEKEENPINNHAVKSLASWALGLIADLSWRYGPFDEIILETTRDALPEKIRKEIDKAMREREKALDKIIGKYKKEFPSIDKRLARKIQLWERQKGLDLYSGKVINLSQLLDGSADIEHIVPQSLGGLSTDYNTIVTLKSVNAAKGNRLPGDWLAGNPDYRERIGMLSEKGLIDWKKRKNLLAQSLDEIYTENTHSKGIRATSYLEALVAQVLKRYYPFPDPELRKNGIGVRMIPGKVTSKTRSLLGIKSKSRETNFHHAEDALILSTLTRGWQNRLHRMLRDNYGKSEAELKELWKKYMPHIEGLTLADYIDEAFRRFMSKGEESLFYRDMFDTIRSISYWVDKKPLSASSHKETVYSSRHEVPTLRKNILEAFDSLNVIKDRHKLTTEEFMKRYDKEIRQKLWLHRIGNTNDESYRAVEERATQIAQILTRYQLMDAQNDKEIDEKFQQALKELITSPIEVTGKLLRKMRFVYDKLNAMQIDRGLVETDKNMLGIHISKGPNEKLIFRRMDVNNAHELQKERSGILCYLNEMLFIFNKKGLIHYGCLRSYLEKGQGSKYIALFNPRFPANPKAQPSKFTSDSKIKQVGIGSATGIIKAHLDLDGHVRSYEVFGTLPEGSIEWFKEESGYGRVEDDPHH

SEQ ID NO: 739 - protein, 1179 aa, Sphaerochaeta globus str. Buddy
MSKKVSRRYEEQAQEICQRLGSRPYSIGLDLGVGSIGVAVAAYDPIKKQPSDLVFVSSRIFIPSTGAAERRQKRGQRNSLRHRANRLKFLWKLLAERNLMLSYSEQDVPDPARLRFEDAVVRANPYELRLKGLNEQLTLSELGYALYHIANHRGSSSVRTFLDEEKSSDDKKLEEQQAMTEQLAKEKGISTFIEVLTAFNTNGLIGYRNSESVKSKGVPVPTRDIISNEIDVLLQTQKQFYQEILSDEYCDRIVSAILFENEKIVPEAGCCPYFPDEKKLPRCHFLNEERRLWEAINNARIKMPMQEGAAKRYQSASFSDEQRHILFHIARSGTDITPKLVQKEFPALKTSIIVLQGKEKAIQKIAGFRFRRLEEKSFWKRLSEEQKDDFFSAWTNTPDDKRLSKYLMKHLLLTENEVVDALKTVSLIGDYGPIGKTATQLLMKHLEDGLTYTEALERGMETGEFQELSVWEQQSLLPYYGQILTGSTQALMGKYWHSAFKEKRDSEGFFKPNTNSDEEKYGRIANPVVHQTLNELRKLMNELITILGAKPQEITVELARELKVGAEKREDIIKQQTKQEKEAVLAYSKYCEPNNLDKRYIERFRLLEDQAFVCPYCLEHISVADIAAGRADVDHIFPRDDTADNSYGNKVVAHRQCNDIKGKRTPYAAFSNTSAWGPIMHYLDETPGMWRKRRKFETNEEEYAKYLQSKGFVSRFESDNSYIAKAAKEYLRCLFNPNNVTAVGSLKGMETSILRKAWNLQGIDDLLGSRHWSKDADTSPTMRKNRDDNRHHGLDAIVALYCSRSLVQMINTMSEQGKRAVEIEAMIPIPGYASEPNLSFEAQRELFRKKILEFMDLHAFVSMKTDNDANGALLKDTVYSILGADTQGEDLVFVVKKKIKDIGVKIGDYEEVASAIRGRITDKQPKWYPMEMKDKIEQLQSKNEAALQKYKESLVQAAAVLEESNRKLIESGKKPIQLSEKTISKKALELVGGYYYLISNNKRTKTFVVKEPSNEVKGFAFDTGSNLCLDFYHDAQGKLCGEIIRKIQAMNPSYKPAYMKQGYSLYVRLYQGDVCELRASDLTEAESNLAKTTHVRLPNAKPGRTFVIIITFTEMGSGYQIYFSNLAKSKKGQDTSFTLTTIKNYDVRKVQLSSAGLVRYVSPLLVDKIEKDEVALCGE

SEQ ID NO: 740 - protein, 1512 aa, Fibrobacter succinogenes subsp. succinogenes S85
MKKILGLDLGTNSIGWAVVNADEITRDDGSRYLKPNGISAAGSRIIPMSADILGDFEKGNSISQTAERTRMRMARRLHERALLRRERLLRVLNLLDFLPKHFADKIDRYGKFTDDSEPKLAWRKNTEGKYEFIFQDAFNEMLAEFKDKQPEIVEEGKKIPYDWTIYYLRKKALEKALSKEELSWILLQFNQKRGYYQLRGEEEEIPQDKKIEYLAQKVVKVEATDQKKGDDVWYNVYLENGMIYRRTSKAPLDWEGKVKEFIVTTEVENDGETPKKDKEGNIKRSFRAPKEDDWTLLKKKTEADIENSHKTVGCYIYDSLLNNPKQKIIGKLVRTVERKFYKEELTQILKKQVELIPELRDDNLYKQCIEELYPINEAHRNTIAKTDFANLFINDILFYQRPLKSKKSQIDNCPYEERIFIDSKTGEKKKVPVKCIAKSNPLFQEFRLWQFIQNLRIYQREKEIDGKLLTDIDITSECLKSEEDYVRLFDWLNDRETIEQEDLLKHLFNTKKSKNKENPYRWNYVEDKVYPCNETRATILKGFSKCGINASVLSPELEMALWHILYSVEDKKEIETALTHFAQKQGWNDDFAKVFSKAKPFKKDYGSYSEKAIKKLLSLMRMGKYWNQDNIDKNTLDRIDKIINGEYDEKISNRVRDNAINLKDISDFRGLPVWLACYIVYDRHSEAKDCTKWNSPEEIDSYLKKFKQHSLRNPIVEQVVTETLRTVRDIWIQEEQIDEIHLELGRDLKNPADKRKKMSENILKNENTNLRIKAMLMEFMNPSMGIENVRPYSPSQQDILRIYEENALDNLTKDDKDFDFISKISKQAQPSKTDIIRYKCWLEQKYRSPYTGKTISLSKLFTPAYEIEHVIPQSLYFDDSFSNKVICEAEVNKLKDRQLGYKFIAEHHGEKVQLSQGEVVEILSVDAYEKFVKENYANNRIKMKKLLMESIPDEFIERQLNDSRYISKVVKGLLSNIVREKIDDENYEPEAVSKNLISCNGAITDRLKKDWGMNDVWNSIILPRFIRMNQITGKDCFTTTNAEGHLIPQMPLELQKGFNKKRIDHRHHAMDAIVIACTTRDHVNLLNNEAAHSKFNATRYQLQRKLRRFEKAVIDGKEREVAKEFLKPWDSFSSDSKNILENIIVSFKQNQRVINKTTNAFLHFDENGKKTFIKQGKGDSWAIRKSMHKDTVFGEINLRKVRSVSLNEAIKVPERVLNKKIKEKILELKNNKIDAKNIKKYIEENHTGGYGIDSSKIDVFYFTKETKERFFATRKTLDTSFNQAKIKDSIADSGIQKILLAHLKSKNGDAEQAFSPDGIDEMNKNIVELNNGKFHQPILKVRVYEKADKFAVGQKGNKKVKFVEAAKGTNLFFAIFEKDGKRSYLTIPLNVMIDCQKQYGNQWKNNIEAYLKEKELVEKDVKLQFILSPNDLVYLPTEGSIDKKRIYKVVSFTNNRLYAIPYAIAKSIVDKNEFTQLNKIEFTDNKESIKDACVPVIIDRLGNVIEFNGKRL

SEQ ID NO: 741 - protein, 1436 aa, Bacteroides fragilis NCTC 9343
MKRILGLDLGTNSIGWALVNEAENKDERSSIVKLGVRVNPLTVDELTNFEKGKSITTNADRTLKRGMRRNLQRYKLRRETLTEVLKEHKLITEDTILSENGNRTTFETYRLRAKAVTEEISLEEFARVLLMINKKRGYKSSRKAKGVEEGTLIDGMDIARELYNNNLTPGELCLQLLDAGKKFLPDFYRSDLQNELDRIWEKQKEYYPEILTDVLKEELRGKKRDAVWAICAKYFVWKENYTEWNKEKGKTEQQEREHKLEGIYSKRKRDEAKRENLQWRVNGLKEKLSLEQLVIVFQEMNTQINNSSGYLGAISDRSKELYFNKQTVGQYQMEMLDKNPNASLRNMVFYRQDYLDEFNMLWEKQAVYHKELTEELKKEIRDIIIFYQRRLKSQKGLIGFCEFESRQIEVDIDGKKKIKTVGNRVISRSSPLFQEFKIWQILNNIEVTVVGKKRKRRKLKENYSALFEELNDAEQLELNGSRRLCQEEKELLAQELFIRDKMTKSEVLKLLFDNPQELDLNFKTIDGNKTGYALFQAYSKMIEMSGHEPVDFKKPVEKVVEYIKAVFDLLNWNTDILGFNSNEELDNQPYYKLWHLLYSFEGDNTPTGNGRLIQKMTELYGFEKEYATILANVSFQDDYGSLSAKAIHKILPHLKEGNRYDVACVYAGYRHSESSLTREEIANKVLKDRLMLLPKNSLHNPVVEKILNQMVNVINVIIDIYGKPDEIRVELARELKKNAKEREELTKSIAQTTKAHEEYKTLLQTEFGLTNVSRTDILRYKLYKELESCGYKTLYSNTYISREKLFSKEFDIEHIIPQARLFDDSFSNKTLEARSVNIEKGNKTAYDFVKEKFGESGADNSLEHYLNNIEDLFKSGKISKTKYNKLKMAEQDIPDGFIERDLRNTQYIAKKALSMLNEISHRVVATSGSVTDKLREDWQLIDVMKELNWEKYKALGLVEYFEDRDGRQIGRIKDWTKRNDHRHHAMDALTVAFTKDVFIQYFNNKNASLDPNANEHAIKNKYFQNGRAIAPMPLREFRAEAKKHLENTLISIKAKNKVITGNINKTRKKGGVNKNMQQTPRGQLHLETIYGSGKQYLTKEEKVNASFDMRKIGTVSKSAYRDALLKRLYENDNDPKKAFAGKNSLDKQPIWLDKEQMRKVPEKVKIVTLEAIYTIRKEISPDLKVDKVIDVGVRKILIDRLNEYGNDAKKAFSNLDKNPIWLNKEKGISIKRVTISGISNAQSLHVKKDKDGKPILDENGRNIPVDFVNTGNNHHVAVYYRPVIDKRGQLVVDEAGNPKYELEEVVVSFFEAVTRANLGLPIIDKDYKTTEGWQFLFSMKQNEYFVFPNEKTGFNPKEIDLLDVENYGLISPNLFRVQKFSLKNYVFRHHLETTIKDTSSILRGITWIDFRSSKGLDTIVKVRVNHIGQIVSVGEY

SEQ ID NO: 742 - protein, 1426 aa, Capnocytophaga ochracea DSM 7271
MKNILGLDLGTTSIGFAHIVEDENKEKSEIKELGVRIVSLTTDEQSDFEKGKSITTNANRTLKHGARLNLDRYQQRRKYLIDLLQKANLITPSSILAENGKNTTHSTWQLRAKAVTERIEKEEFARILLAINKKRGYKSSRKAKTEDEGQAIDGMAIAKRLYDENLTPGQLSLQLLQQNKKLLPDFYRSDLQKEFDLVWNFQKQFYPDILTDIFYKELQGKGKDATSKAFSKRYHFDTTENKGSKESVRLQAYQWRAEAISKQLSKEEVAYVLTEINNNLNNASGYLGAISDRSKELYFNRQTVGQYLYAKLQENRHNSLKNKVFYRQDYLDEFERIWETQASFHKELTDELKKQIRDVVIFYQRKPKSQKGLISFCEFESKEIEIEKDGKTITKNIGARVVPKSSPLFQEFKIWQILNNVICKRKGIRKKKISAKTTQLDLLNESSQTIFSLDMECKQLLFDELNLKGDLKSDKVLKLLGYSPQEWEINYNQLEGNRTQKALYEAYLKIVEMEAHDVKDILQIKSAKDDWSLDESPLSASEIREKVKAIFQTLGICTKILYFDPLLPVKEFEEQDSYQLWHLLYSYESDDSTSGNETLYRILEKKYAFKREHARILANVALQDDYGSLSTKAIRKIYPNIKENQYSTACEKAGYKHSKLSLTTEELEARELKNIIPLLKKNALRNPVVEKILNQMINVVNALIEKNSERDAEGKITKYFHFDEIRIELARELKKNAQKRYEMTQNINKAKLEHQKISEILQKEFGIKNPTKSDIIRYRLYQELEHNGYKELYTNAPIARDMLFSKNIEIEHIVPKARVFDDSFSNKTLTFHRINSDKGEYTAFDYITSLNSEEELNQYLTRVENAYKTKSISPTKYKNLLKKASEIGDDFINRDLRDTQYIAKKAKEILFQVTKNVLSTSGSITDRLREDWGLVDVMKELNMPKYQSLGLTEVEERKDGNKVTVIKNWTKRNDHRHHAMDALTVAFTKPSYIQYLNHLNARKDENNKNYSVILAIEEKETIKVPTNNGKNKRVFIEPIPNFRQVAKKHLEEIFISHKAKNKVVTKNTNKPAGTDKQQITLTPRGQLHKETIYGKYQYYINKEEKIGVKFDERTIAKVSNPVYREALLKRLQANDNDPKKAFAGKNALSKNPIYLDESKTKTLPEKVNLTYLEEDFSIRKDISPDNFKDLKSIEKVIDQGVKRILIKRLQAYDNDPKKAFVDLEKNPIWLNKEKGIAIKRVTISGVNNAQPLHIGKDHLGKTTLNKEGKEIPVDYVSTGNNHHVAIYRDKEGNLQEQIVSFFDAVVRAQQGIPIIDKTYKQAEGWQFLFTMKQNEMFVFPNATTGFNPAEIDLLDPKNKKLISPNLFRVQKIATKDYFFRHHLETNVETDNILKNVTWKREGLSGLKDIVKVRINHLGDIVSIGEY

SEQ ID NO: 743 - protein, 1066 aa, Rhodopseudomonas palustris BisB18
MSERVVRRILGIDLGIASCGWGVVDISGAGGGIIATGVRCFDAPLIDKTGEPKSATRRTARGQRRIVRRRRQRMNGVRRLLCEFGLLPDPRPDALNQAMRRISTASAAAQVTPWTLRAAAHQRLLSNEELAVVLGHIARHRGFRSNAKNEAGANAADETSKMKKAMEATREGLAKYHAFGDMIANDPKFANRKRNRDKDYSHTAKRSDLEDEVRAILRAQLRFGSAAATETLAQTFADVAFFQRPLQDSEDRVGDCPFEPGQKRAARRAPSFELFRFLSRLANLKLAVGRSPERRLTAEEIALAAKGFGETKKTITFKSLREALDLDPNARFSGIGKDKEASLDVVARTGGAAYGTKTLKDALGDAPWRSLSRTPETLDRIAEILSFREDITSIRNGLEDLGLDSLVVEALMQAAANGDFKEFTRAGHISARAARNIIPGLREGLVYSEACARVGYDHAARLSVPLDQVGSPVTRKALSEALKQVRAVAREYGPIDYFHIELARSVGKSAEERKQLTDGIEARNVEKAKRRKQAEEHLGRAPSDDELLRYELAKEQNFKCIYSGDAIDPAGVAANDTRYQVDHILPWSRFGDDSYLNKTLCTARSNQNKRGRTPFEWFEADKTDVEWMEYVARVENLQEVKGRKKRNYSIKDAAAIEDKFKARNLTDTQWATRLLADELSRMFPPRECERAICGRADGGNDGLTIVEERRVFTRPGAITSKLRRAWGLEGLKKQDGKRVEDDRHHAVDALVLAATTESLLQRLTVEVQRREREGRPDDIFHCAEPWRGFRADVRRTVYGSETMPGIFVSRAERRRARGKAHDATIKQIREIEGERLVFERKPVEKLTDKDLEKIPIPKPYGQVSDPKRLRDELVESLRAWIAAGKPKDRPPLSPKGDVIRKVRIQTNDKVSVEINGGTVDRGDMARVDVFRKKNKKAVWEYYVVPIYPHQIVALNDPPDRAVIAYAEDKDWKEIDSSYEFLWSLFGLSYVEISKANGECIDGYFRGLHRGTGAASVCKHISLGKDATVSGIGLKTLASFKKFTIDRLGRKFEIPREVRTWRGEACT

SEQ ID NO: 744 - protein, 1425 aa, Prevotella micans F0438
MIQKIFGLDLGTNSIGSSVRNLELGENLTEQLEFFSSDIFGSSVSKNSNGREYSLAGNRSAHRRSRGLNEARRRKLWATLDLLIEHGLCPMSPDSLMQWRTYDKQKGLYRQYPIEDKDFNAWIMLDFNGDGKPDYSSPYQLRRELVVRQFDFDQPIERYKLGRALYHIAQHRGFKSSKGETIADQEKNEKKPIAEEGADIANEMKASETKLSKGLVAYMQENHLKTVGEAFAKLEDERVRIRNNESYRAIRSQYQDEIKEIFTYQKKLSVESELYERLTSEKKGVGTIFYKRPLRSQRGNVGKCTLERNKPRCPIGRPEFEEFRAWTLINNIKIRETAGEPYKQLPIKLRQELLKDCFLSKVKADFKFEDIRKYIEKRLGLSFSNDDKTINYKDSVSIAACPVTVRMKKLLGENWANCRIDGEKRRQAHGKNNNNEHIVSYTEEDIWHVCYNAEDPEEVSNFARKALHWDENKIKELVRLWTSIPQGYAMLSLKAIRNINRMLLLGLKYSDAVLLAKLPDIVPVSDEDILAITKEFLQLEDKLNQEKQINNIVNSLIANYKSKLEENRFADHNYQYQLGEGDDEDINTQIKSHIGAKLWVQIGADEQTKIFQAVRSKYQDFFKSYKRKFVESPKLGELLVAFLTEKFPNVKSKQWERLYHPSQIAIYRPIPVDNDRSKLRLGNPNIGAIKNPTVMRVLNTLRRRVNQLLDDGVISPDETRVVVETARELNDANTKWALDRYNRIRRDENEKIRKILKELNPTTNSISEQDIDKARYIFEQCETDFYTDGKVPYYNKDIKKYKLWLEQGGQCLYTGQTINLTNLFNPNAFDMEHTIPKSISFDNSDQNLTLCESYYNRFIKKNNIPTDMPNYDKDVTINGKEYTAIKPRLQRWKERVDRLSRNVDFWKGQARRAQDKDRKDECIREKHLWDMELAYWKGKLERFTMTDVTDGFKNSQLVDTRVITRHAVLYLKSIFNHVEVQRGETTAEFRKILGLQSIDEKKDRSLHSHHAIDATMLTVIPSAAKRDRMLELFYKIEETKKALKNYNDNNKTGLNLELKGLEEKLDKEKKDCRVGRRVNDLDRFINENIIVSHHTKDQALTPAHRRLRKRGKIVGGKEHPRWQTGDSLRGEIHKASYYGAITQFAKDANGKVLMKDGQAQIDPTIYYVIRRELKYKRSTQDSGFTNWEDLEKVIVDTDLFGLMKGQFPEGTSFKDACEQGFYMIKKGKNGEGDVKTHRIRHVRCKAVKTALRIKEQTYKSSKDYKQFFYAAVGDLYVMCYYTDGKKRDFKIYSLYDISNHRKSGTEDIPKFITDKKGNHLPLDYKLRTGDMVLLYKDNPEELKDLDQVNLKRRLYKVNRFESEGLIILLTHHLSTTTERGCSIGKIENYQNLPTAIRCGIKTIKFLIMGKHRDFVIRNGNIEFKH

SEQ ID NO: 745 - protein, 1204 aa, Prevotella ruminicola 23
MERILGIDTGTNSLGWAIVDKDENQYHLVAKGTNIFSEGVKIEKGIESSKAAERTEHRSVRKHYWRRKIRKIRLLTILSDNDLCPRLKHEQLRQWRLKKVYPTDDTFMEWQRTEDKAQVNPYKFRYICLTQKLDLSDITQRFILGRALYHLNQRRGFLSNRKEATKESEGTVKEGISSLSKDMKDSGCEYLGEYFYQLYQQGKKIRNHYTARKEHYLKEFKAICSKQELDDALIEKLEKAIFDQRPLKSQKGQVGTCTFEKGKSRCPSSHPLYEDFRMYSFINNIKVQVDTLYDKGERSLTDEEKQLIIPLFKRKSKRTFPFEDIAKKIAGKNNYCYIKSNEEKAYKFNYQMDTQVSGSPVNAQLEEIFGEDWLSSVCEVYTLANNKSRFQIMNDVWHVLFFYDDEDKLKEFAKDRLQLDDELAEKFSKISIPNDYAALSLKAIRKIMPYLRDYGLIYSEAVFLANLVDVLPQHVWGIKEMREAAIENVIDVMHSYDKNNIDGITLEGCVKTFLKERYQVSDDNLKKLYHPSMLDPYPRQRPNDEGVFQLGSPRISSVKNPMAMHSLFRLRKVVNLMLKKGYITPDTKVHIEFSRDLNDANKRWAIQTWQRENEKERERCRKEIEKYIASPSDTDILKYQLWEEQNHKCLYTGDEIRITDFLGDNPKYDIEHTIPRSAGGDSTKMNLTLCSSRFNRDEKKTKLPAELVNHDEILERISNWKEKYEDIDKQIRKISTKGATSKEDKDSKIRRRHYLILQRDYWRGKYQRFTMTEVPEGFSRRQGTDISVISRYARMYLKSVFKQVYIVKGIATSDFRKMWGIQDEYAKKERVNHVHHCIDAITIACIGKAEYDKLADYRHQYDDYLFQGKTKPTFDKPWPSFVIDIKHIQDELLIAHYAKDNLEKFTKKNLRGKDGRIIRDKFGNKLQMKGDTSRNSLHNDKFYGAINHEGEIKYVYRTNIEALDAKSIGNIVDPTVRSIIESAIAIHGSLKAAINKGIWMNEEKHIPIKKVRVFRNDVKKPIELKDQRDLSDKDYKQHYYVTNDGNYMMLIFSKLNNKGREIRQHVVINSLEATEVIKSHKRSQVGKVVWESYYSKEGFDLIYKLKSGTMILLYENNRDEVWDLDIRNLQKRLYIITKMKYDGRIYMMHHQEAREKKDLEEKSGSFKINEDYRPLIVNSYNQFNALVQDLDFEINDLGEIRRLI

SEQ ID NO: 746 - protein, 1535 aa, Flavobacterium columnare ATCC 49512
MTKILGLDLGTNSIGWAIRDTENEGINQILDKGARIFSEGVKSENGKEISRAAERTAYRSARKIKYRRKLRKYETLKVLSINGMCPLSVEEVEQWKKSGFKEYPLNPEFLDWLRTNEDKNINPYLFRDKASKQKVTLFELGRALYHIAQRRGFLSNRLDQSAEGVFEEHNPQIQNLIEDLDSSNTILNELKEYYINLGIIDETEKSGFKKDLDEGEKKLKSLYNSLVAITKKNANDIETCKQELIARLNKKEDLGKVKGKIKDISQAMLDRNFKTLGQYFFSLYNKERIRNQYTSREEHYLEEFIIICQTQGIEGINTNEKLPEKKFTGLAKDLYRAIFFQRPLKSQKGLIGKCSFEKNKSRCAVSHPDYEEFRMWSYLNTIKIGTQSEKTLRFLTLEEKLKLVPKFYRKSDFNFEVLAKELVEKGASFGYYKSSKKNEFFYWFNYKPTDSVSACVVSASLENAIGKDWKIKTFEYQTRNTEKNEVTKSVDYKDLWHLLSVATSDTYLYDFAIEKLKLEPKNAKAFSKTKLKKDFASLSLAAIAKILPYLKQGLLYSHAVFMANIENIVDADIWKDEEQQKFIQSKIVELVDNYIVEKSKLELINGLLKIYNTEDKEGRKVYYSKEAESLFEADLRKKLVPFYKANIIIEEHEQEIIFQDLFPILMDQLKKQEFIKIGRLDKQIEAFLEGENEEGQIFCNHTDKLKKLYHPSDIEVFKKKTIKDEWGNEKVVLGSPLTTSIKNPMAMRALHQLRKVLNTLIANDQIDEDTRIHIEMARELNDANKRKGIQDFQNENKKFREEAIKEIKKLYLEECHKDVNPTEDDILRYQLWLEQGKCEIYEEGNNISICDIIGSNPSYDIEHTIPRSISQDNSQMNKTLCSLKFNRSIKKQKMPVELSNYNDILPRIAHWKKEAEELTRQIETISRSIKSAATKVAKDKNIRKRHYLTLKRDYILGKYERFTWEEPKVGFKNSQIPDTGIITKYAQAYLKSYFKRVESVKGGAVAEFRKLWGIQESFIDENWWKHYKDKDRDKHTHHTIDAITIACMPKDKYDLLAHAWRLEDEQDKKAAKVLIEQAKPWKTFKEDIEKIETEILVSHFTPDNVKKQSKSIIKNRGKKVYVLKNELPVNFKNKIEGKDYFKLKFDSKILYKIPKKKEKQTDTFYEELPKNYLNGVEGKDYFKINTTGKTFYKIPIFNQGDTIRGSLHQETTYGAIKLPDIDIETKKPLHTDKGGFILKKDIKGNEIVFFVVRKEISKISENDVQNIVDNVVRKKIENAIANSLITFKIVKKKKVAVIKEGVTIWMREPNIEKGIEGIPIKKVRIITNSVKNPIEIKVHSPLSKSRHKHKQKVYGQNDENYAMALYELDGKREFELINNFNLAKLLKQSQSYYPLHKEKEIKGKKILVPIEKRNNKDVILKRGQQVVFYDKTVENPKDISEIIDFRERIYIIEGLTIQRQKDKKTSKVNEYGIIQLRHFKEARKSEEISKDNFKPDGEFKINENKPTRKMNHNQFTAFVEGIDFKVLPSGKFQKI

SEQ ID NO: 747 - protein, 1052 aa, Aminomonas paucivorans DSM 12260
MIGEHVRGGCLFDDHWTPNWGAFRLPNTVRTFTKAENPKDGSSLAEPRRQARGLRRRLRRKTQRLEDLRRLLAKEGVLSLSDLETLFRETPAKDPYQLRAEGLDRPLSFPEWVRVLYHITKHRGFQSNRRNPVEDGQERSRQEEEGKLLSGVGENERLLREGGYRTAGEMLARDPKFQDHRRNRAGDYSHTLSRSLLLEEARRLFQSQRTLGNPHASSNLEEAFLHLVAFQNPFASGEDIRNKAGHCSLEPDQIRAPRRSASAETFMLLQKTGNLRLIHRRTGEERPLTDKEREQIHLLAWKQEKVTHKTLRRHLEIPEEWLFTGLPYHRSGDKAEEKLFVHLAGIHEIRKALDKGPDPAVWDTLRSRRDLLDSIADTLTFYKNEDEILPRLESLGLSPENARALAPLSFSGTAHLSLSALGKLLPHLEEGKSYTQARADAGYAAPPPDRHPKLPPLEEADWRNPVVFRALTQTRKVVNALVRRYGPPWCIHLETARELSQPAKVRRRIETEQQANEKKKQQAEREFLDIVGTAPGPGDLLKMRLWREQGGFCPYCEEYLNPTRLAEPGYAEMDHILPYSRSLDNGWHNRVLVHGKDNRDKGNRTPFEAFGGDTARWDRLVAWVQASHLSAPKKRNLLREDFGEEAERELKDRNLTDTRFITKTAATLLRDRLTFHPEAPKDPVMTLNGRLTAFLRKQWGLHKNRKNGDLHHALDAAVLAVASRSFVYRLSSHNAAWGELPRGREAENGFSLPYPAFRSEVLARLCPTREEILLRLDQGGVGYDEAFRNGLRPVFVSRAPSRRLRGKAHMETLRSPKWKDHPEGPRTASRIPLKDLNLEKLERMVGKDRDRKLYEALRERLAAFGGNGKKAFVAPFRKPCRSGEGPLVRSLRIFDSGYSGVELRDGGEVYAVADHESMVRVDVYAKKNRFYLVPVYVADVARGIVKNRAIVAHKSEEEWDLVDGSFDFRFSLFPGDLVEIEKKDGAYLGYYKSCHRGDGRLLLDRHDRMPRESDCGTFYVSTRKDVLSMSKYQVDPLGEIRLVGSEKPPFVL

SEQ ID NO: 748 - protein, 1173 aa, Rhodospirillum rubrum ATCC 11170
MRPIEPWILGLDIGTDSLGWAVFSCEEKGPPTAKELLGGGVRLFDSGRDAKDHTSRQAERGAFRRARRQTRTWPWRRDRLIALFQAAGLTPPAAETRQIALALRREAVSRPLAPDALWAALLHLAHHRGFRSNRIDKRERAAAKALAKAKPAKATAKATAPAKEADDEAGFWEGAEAALRQRMAASGAPTVGALLADDLDRGQPVRMRYNQSDRDGVVAPTRALIAEELAEIVARQSSAYPGLDWPAVTRLVLDQRPLRSKGAGPCAFLPGEDRALRALPTVQDFIIRQTLANLRLPSTSADEPRPLTDEEHAKALALLSTARFVEWPALRRALGLKRGVKFTAETERNGAKQAARGTAGNLTEAILAPLIPGWSGWDLDRKDRVFSDLWAARQDRSALLALIGDPRGPTRVTEDETAEAVADAIQIVLPTGRASLSAKAARAIAQAMAPGIGYDEAVTLALGLHHSHRPRQERLARLPYYAAALPDVGLDGDPVGPPPAEDDGAAAEAYYGRIGNISVHIALNETRKIVNALLHRHGPILRLVMVETTRELKAGADERKRMIAEQAERERENAEIDVELRKSDRWMANARERRQRVRLARRQNNLCPYTSTPIGHADLLGDAYDIDHVIPLARGGRDSLDNMVLCQSDANKTKGDKTPWEAFHDKPGWIAQRDDFLARLDPQTAKALAWRFADDAGERVARKSAEDEDQGFLPRQLTDTGYIARVALRYLSLVTNEPNAVVATNGRLTGLLRLAWDITPGPAPRDLLPTPRDALRDDTAARRFLDGLTPPPLAKAVEGAVQARLAALGRSRVADAGLADALGLTLASLGGGGKNRADHRHHFIDAAMIAVTTRGLINQINQASGAGRILDLRKWPRTNFEPPYPTFRAEVMKQWDHIHPSIRPAHRDGGSLHAATVFGVRNRPDARVLVQRKPVEKLFLDANAKPLPADKIAEIIDGFASPRMAKRFKALLARYQAAHPEVPPALAALAVARDPAFGPRGMTANTVIAGRSDGDGEDAGLITPFRANPKAAVRTMGNAVYEVWEIQVKGRPRWTHRVLTRFDRTQPAPPPPPENARLVMRLRRGDLVYWPLESGDRLFLVKKMAVDGRLALWPARLATGKATALYAQLSCPNINLNGDQGYCVQSAEGIRKEKIRTTSCTALGRLRLSKKAT

SEQ ID NO: 749 - protein, 1035 aa, Candidatus Puniceispirillum marinum IMCC1322
MRRLGLDLGTNSIGWCLLDLGDDGEPVSIFRTGARIFSDGRDPKSLGSLKATRREARLTRRRRDRFIQRQKNLINALVKYGLMPADEIQRQALAYKDPYPIRKKALDEAIDPYEMGRAIFHINQRRGFKSNRKSADNEAGVVKQSIADLEMKLGEAGARTIGEFLADRQATNDTVRARRLSGTNALYEFYPDRYMLEQEFDTLWAKQAAFNPSLYIEAARERLKEIVFFQRKLKPQEVGRCIFLSDEDRISKALPSFQRFRIYQELSNLAWIDHDGVAHRITASLALRDHLFDELEHKKKLTFKAMRAILRKQGVVDYPVGFNLESDNRDHLIGNLTSCIMRDAKKMIGSAWDRLDEEEQDSFILMLQDDQKGDDEVRSILTQQYGLSDDVAEDCLDVRLPDGHGSLSKKAIDRILPVLRDQGLIYYDAVKEAGLGEANLYDPYAALSDKLDYYGKALAGHVMGASGKFEDSDEKRYGTISNPTVHIALNQVRAVVNELIRLHGKPDEVVIEIGRDLPMGADGKRELERFQKEGRAKNERARDELKKLGHIDSRESRQKFQLWEQLAKEPVDRCCPFTGKMMSISDLFSDKVEIEHLLPFSLTLDDSMANKTVCFRQANRDKGNRAPFDAFGNSPAGYDWQEILGRSQNLPYAKRWRFLPDAMKRFEADGGFLERQLNDTRYISRYTTEYISTIIPKNKIWVVTGRLTSLLRGFWGLNSILRGHNTDDGTPAKKSRDDHRHHAIDAIVVGMTSRGLLQKVSKAARRSEDLDLTRLFEGRIDPWDGFRDEVKKHIDAIIVSHRPRKKSQGALHNDTAYGIVEHAENGASTVVHRVPITSLGKQSDIEKVRDPLIKSALLNETAGLSGKSFENAVQKWCADNSIKSLRIVETVSIIPITDKEGVAYKGYKGDGNAYMDIYQDPTSSKWKGEIVSRFDANQKGFIPSWQSQFPTARLIMRLRINDLLKLQDGEIEEIYRVQRLSGSKILMAPHTEANVDARDRDKNDTFKLTSKSPGKLQSASARKVHISPTGLIREG

SEQ ID NO: 750 - protein, 1068 aa, Verminephrobacter eiseniae EF01-2
MNKAVAYRLALDLGSTSLGWAIFRLNEAREPTAIIRAGVRIFSDGRNANSEPLAVHRRVARAMRRRRDRLLKRKKRMHDQLVQHGFFPAEVAERKELERLNPYQLRAKGLHEALTPGEFARALFHINQRRGFKSNRKTDRKDNDSGALKQAISELRKRIQDSDCATAGEWFWKERMQQKPEGVRGQWVRARYRKTPSTTDEGKKRIGYDLYVDRAMVEQEFDALWAAQAALQPGLFTEAARAELKDTLLYQRDLRPVKPGRCTLLPAEERAPLALPSTQRFRILQEVNNLRLLDEALREVPLNLAQRDAVVSALEGKKELSFAAIRKLLTLSGKFNLEDEKRAELKGNATSVILARKDLFGDAWAGFDAAVQDEIVWRLVSQESEGALIAWLQQHTGVDGVCAEAIVNTRLPDGYGRLSRKALERIVPALQREVCTYDKAVQAAGFAHHSDLGFDFDYAEDEVQQVGEHTIASTGEVQAQYAFKQLPYYGKALQRHVAFGSGDAKDHEEKCYGKIANPTVHIGLNQVRTVVNALIRRYGHPTEVVVELARDLKQSREQKQQTQREQADNQKRNEDIRKRIAPILETSPERVRDRDIKKWILWEELNKKDIADRHCPYSGERISATMLLSEAVEIEHILPFSRTLDDSLNNRTVAMRRANRIKGDRTPWEARADFEAQGWRYEAILQRAEGMPPRKRYRFAEDGYQRWLGKDRNFLARALNDTSYLSRLAANYLRLVCPQGVRVIPGQMTDKLRGKFGLNSVLGLDGKKNRNDHRHHAVDACVIGVTDQGLMQRFANASKQARENGLTRLVQDMLLPWWPSYYDHVERAVRHIRVSHRPDHGFEGAMMKGTAHGIREDGIREDGRIKQRPKAKGSADHKTITLIPIDEPRQLARHGVDAEGKPLPYKGYASGSNYCIEITKNGKGKWEGQVISTFDAYRIKAAADAAARAGQVISTVEADSIVRKSGWERLRGAQSQNGQPLVMRLVIGDSVRMEVDGRDEVMRVVKMSGKEMVFAPVREANVDKRNNMPDEQDPFTYTYKRADQLRKAKARQVTISPIGELRDPGFKG

SEQ ID NO: 751 - protein, 1062 aa, Ralstonia syzygii R24
MAEKQHRWGLDIGTNSIGWAVIALIEGRPAGLVATGSRIFSDGRNPKDGSSLAVERRGPRQMRRRRDRYLRRRDRFMQALINVGLMPGDAAARKALVTENPYVLRQRGLDQALTLPEFGRALFHLNQRRGFQSNRKTDRATAKESGKVKNAIAAFRAGMGNARTVGEALARRLEDGRPVRARMVGQGKDEHYELYIAREWIAQEFDALWASQQRFHAEVLADAARDRLRAILLFQRKLLPVPVGKCFLEPNQPRVAAALPSAQRFRLMQELNHLRVMTLADKRERPLSFQERNDLLAQLVARPKCGFDMLRKIVFGANKEAYRFTIESERRKELKGCDTAAKLAKVNALGTRWQALSLDEQDRLVCLLLDGENDAVLADALREHYGLTDAQIDTLLGLSFEDGHMRLGRSALLRVLDALESGRDEQGLPLSYDKAVVAAGYPAHTADLENGERDALPYYGELLWRYTQDAPTAKNDAERKFGKIANPTVHIGLNQLRKLVNALIQRYGKPAQIVVELARNLKAGLEEKERIKKQQTANLERNERIRQKLQDAGVPDNRENRLRMRLFEELGQGNGLGTPCIYSGRQISLQRLFSNDVQVDHILPFSKTLDDSFANKVLAQHDANRYKGNRGPFEAFGANRDGYAWDDIRARAAVLPRNKRNRFAETAMQDWLHNETDFLARQLTDTAYLSRVARQYLTAICSKDDVYVSPGRLTAMLRAKWGLNRVLDGVMEEQGRPAVKNRDDHRHHAIDAVVIGATDRAMLQQVATLAARAREQDAERLIGDMPTPWPNFLEDVRAAVARCVVSHKPDHGPEGGLHNDTAYGIVAGPFEDGRYRVRHRVSLFDLKPGDLSNVRCDAPLQAELEPIFEQDDARAREVALTALAERYRQRKVWLEELMSVLPIRPRGEDGKTLPDSAPYKAYKGDSNYCYELFINERGRWDGELISTFRANQAAYRRFRNDPARFRRYTAGGRPLLMRLCINDYIAVGTAAERTIFRVVKMSENKITLAEHFEGGTLKQRDADKDDPFKYLTKSPGALRDLGARRIFVDLIGRVLDPGIKGD

SEQ ID NO: 752 - protein, 1079 aa, Dinoroseobacter shibae DFL 12
MRLGLDIGTSSIGWWLYETDGAGSDARITGVVDGGVRIFSDGRDPKSGASLAVDRRAARAMRRRRDRYLRRRATLMKVLAETGLMPADPAEAKALEALDPFALRAAGLDEPLPLPHLGRALFHLNQRRGFKSNRKTDRGDNESGKIKDATARLDMEMMANGARTYGEFLHKRRQKATDPRHVPSVRTRLSIANRGGPDGKEEAGYDFYPDRRHLEEEFHKLWAAQGAHHPELTETLRDLLFEKIFFQRPLKEPEVGLCLFSGHHGVPPKDPRLPKAHPLTQRRVLYETVNQLRVTADGREARPLTREERDQVIHALDNKKPTKSLSSMVLKLPALAKVLKLRDGERFTLETGVRDAIACDPLRASPAHPDRFGPRWSILDADAQWEVISRIRRVQSDAEHAALVDWLTEAHGLDRAHAEATAHAPLPDGYGRLGLTATTRILYQLTADVVTYADAVKACGWHHSDGRTGECFDRLPYYGEVLERHVIPGSYHPDDDDITRFGRITNPTVHIGLNQLRRLVNRIIETHGKPHQIVVELARDLKKSEEQKRADIKRIRDTTEAAKKRSEKLEELEIEDNGRNRMLLRLWEDLNPDDAMRRFCPYTGTRISAAMIFDGSCDVDHILPYSRTLDDSFPNRTLCLREANRQKRNQTPWQAWGDTPHWHAIAANLKNLPENKRWRFAPDAMTRFEGENGFLDRALKDTQYLARISRSYLDTLFTKGGHVWVVPGRFTEMLRRHWGLNSLLSDAGRGAVKAKNRTDHRHHAIDAAVIAATDPGLLNRISRAAGQGEAAGQSAELIARDTPPPWEGFRDDLRVRLDRIIVSHRADHGRIDHAARKQGRDSTAGQLHQETAYSIVDDIHVASRTDLLSLKPAQLLDEPGRSGQVRDPQLRKALRVATGGKTGKDFENALRYFASKPGPYQAIRRVRIIKPLQAQARVPVPAQDPIKAYQGGSNHLFEIWRLPDGEIEAQVITSFEAHTLEGEKRPHPAAKRLLRVHKGDMVALERDGRRVVGHVQKMDIANGLFIVPHNEANADTRNNDKSDPFKWIQIGARPAIASGIRRVSVDEIGRLRDGGTRPI

SEQ ID NO: 753 - protein, 1168 aa, Azospirillum sp- B510
MARPAFRAPRREHVNGWTPDPHRISKPFFILVSWHLLSRVVIDSSSGCFPGTSRDHTDKFAEWECAVQPYRLSFDLGTNSIGWGLLNLDRQGKPREIRALGSRIFSDGRDPQDKASLAVARRLARQMRRRRDRYLTRRTRLMGALVRFGLMPADPAARKRLEVAVDPYLARERATRERLEPFEIGRALFHLNQRRGYKPVRTATKPDEEAGKVKEAVERLEAAIAAAGAPTLGAWFAWRKTRGETLRARLAGKGKEAAYPFYPARRMLEAEFDTLWAEQARHHPDLLTAEAREILRHRIFHQRPLKPPPVGRCTLYPDDGRAPRALPSAQRLRLFQELASLRVIHLDLSERPLTPAERDRIVAFVQGRPPKAGRKPGKVQKSVPFEKLRGLLELPPGTGFSLESDKRPELLGDETGARIAPAFGPGWTALPLEEQDALVELLLTEAEPERAIAALTARWALDEATAAKLAGATLPDFHGRYGRRAVAELLPVLERETRGDPDGRVRPIRLDEAVKLLRGGKDHSDFSREGALLDALPYYGAVLERHVAFGTGNPADPEEKRVGRVANPTVHIALNQLRHLVNAILARHGRPEEIVIELARDLKRSAEDRRREDKRQADNQKRNEERKRLILSLGERPTPRNLLKLRLWEEQGPVENRRCPYSGETISMRMLLSEQVDIDHILPFSVSLDDSAANKVVCLREANRIKRNRSPWEAFGHDSERWAGILARAEALPKNKRWRFAPDALEKLEGEGGLRARHLNDTRHLSRLAVEYLRCVCPKVRVSPGRLTALLRRRWGIDAILAEADGPPPEVPAETLDPSPAEKNRADHRHHALDAVVIGCIDRSMVQRVQLAAASAEREAAAREDNIRRVLEGFKEEPWDGFRAELERRARTIVVSHRPEHGIGGALHKETAYGPVDPPEEGFNLVVRKPIDGLSKDEINSVRDPRLRRALIDRLAIRRRDANDPATALAKAAEDLAAQPASRGIRRVRVLKKESNPIRVEHGGNPSGPRSGGPFHKLLLAGEVHHVDVALRADGRRWVGHWVTLFEAHGGRGADGAAAPPRLGDGERFLMRLHKGDCLKLEHKGRVRVMQVVKLEPSSNSVVVVEPHQVKTDRSKHVKISCDQLRARGARRVTVDPLGRVRVHAPGARVGIGGDAGRTAMEPAEDIS

SEQ ID NO: 754 - protein, 1166 aa, Nitrobacter hamburgensis X14
MHVEIDFPHFSRGDSHLAMNKNEILRGSSVLYRLGLDLGSNSLGWFVTHLEKRGDRHEPVALGPGGVRIFPDGRDPQSGTSNAVDRRMARGARKRRDRFVERRKELIAALIKYNLLPDDARERRALEVLDPYALRKTALTDTLPAHHVGRALFHLNQRRGFQSNRKTDSKQSEDGAIKQAASRLATDKGNETLGVFFADMHLRKSYEDRQTAIRAELVRLGKDHLTGNARKKIWAKVRKRLFGDEVLPRADAPHGVRARATITGTKASYDYYPTRDMLRDEFNAIWAGQSAHHATITDEARTEIEHIIFYQRPLKPAIVGKCTLDPATRPFKEDPEGYRAPWSHPLAQRFRILSEARNLEIRDTGKGSRRLTKEQSDLVVAALLANREVKFDKLRTLLKLPAEARFNLESDRRAALDGDQTAARLSDKKGFNKAWRGFPPERQIAIVARLEETEDENELIAWLEKECALDGAAAARVANTTLPDGHCRLGLRAIKKIVPIMQDGLDEDGVAGAGYHIAAKRAGYDHAKLPTGEQLGRLPYYGQWLQDAVVGSGDARDQKEKQYGQFPNPTVHIGLGQLRRVVNDLIDKYGPPTEISIEFTRALKLSEQQKAERQREQRRNQDKNKARAEELAKFGRPANPRNLLKMRLWEELAHDPLDRKCVYTGEQISIERLLSDEVDIDHILPVAMTLDDSPANKIICMRYANRHKRKQTPSEAFGSSPTLQGHRYNWDDIAARATGLPRNKRWRFDANAREEFDKRGGFLARQLNETGWLARLAKQYLGAVTDPNQIWVVPGRLTSMLRGKWGLNGLLPSDNYAGVQDKAEEFLASTDDMEFSGVKNRADHRHHAIDGLVTALTDRSLLWKMANAYDEEHEKFVIEPPWPTMRDDLKAALEKMVVSHKPDHGIEGKLHEDSAYGFVKPLDATGLKEEEAGNLVYRKAIESLNENEVDRIRDIQLRTIVRDHVNVEKTKGVALADALRQLQAPSDDYPQFKHGLRHVRILKKEKGDYLVPIANRASGVAYKAYSAGENFCVEVFETAGGKWDGEAVRRFDANKKNAGPKIAHAPQWRDANEGAKLVMRIHKGDLIRLDHEGRARIMVVHRLDAAAGRFKLADHNETGNLDKRHATNNDIDPFRWLMASYNTLKKLAAVPVRVDELGRVWRVMPN

SEQ ID NO: 755 - protein, 1064 aa, Bradyrhizobium sp- BTAi1
MKRTSLRAYRLGVDLGANSLGWFVVWLDDHGQPEGLGPGGVRIFPDGRNPQSKQSNAAGRRLARSARRRRDRYLQRRGKLMGLLVKHGLMPADEPARKRLECLDPYGLRAKALDEVLPLHHVGRALFHLNQRRGLFANRAIEQGDKDASAIKAAAGRLQTSMQACGARTLGEFLNRRHQLRATVRARSPVGGDVQARYEFYPTRAMVDAEFEAIWAAQAPHHPTMTAEAHDTIREAIFSQRAMKRPSIGKCSLDPATSQDDVDGFRCAWSHPLAQRFRIWQDVRNLAVVETGPTSSRLGKEDQDKVARALLQTDQLSFDEIRGLLGLPSDARFNLESDRRDHLKGDATGAILSARRHFGPAWHDRSLDRQIDIVALLESALDEAAIIASLGTTHSLDEAAAQRALSALLPDGYCRLGLRAIKRVLPLMEAGRTYAEAASAAGYDHALLPGGKLSPTGYLPYYGQWLQNDVVGSDDERDTNERRWGRLPNPTVHIGIGQLRRVVNELIRWHGPPAEITVELTRDLKLSPRRLAELEREQAENQRKNDKRTSLLRKLGLPASTHNLLKLRLWDEQGDVASECPYTGEAIGLERLVSDDVDIDHLIPFSISWDDSAANKVVCMRYANREKGNRTPFEAFGHRQGRPYDWADIAERAARLPRGKRWRFGPGARAQFEELGDFQARLLNETSWLARVAKQYLAAVTHPHRIHVLPGRLTALLRATWELNDLLPGSDDRAAKSRKDHRHHAIDALVAALTDQALLRRMANAHDDTRRKIEVLLPWPTFRIDLETRLKAMLVSHKPDHGLQARLHEDTAYGTVEHPETEDGANLVYRKTFVDISEKEIDRIRDRRLRDLVRAHVAGERQQGKTLKAAVLSFAQRRDIAGHPNGIRHVRLTKSIKPDYLVPIRDKAGRIYKSYNAGENAFVDILQAESGRWIARATTVFQANQANESHDAPAAQPIMRVFKGDMLRIDHAGAEKFVKIVRLSPSNNLLYLVEHHQAGVFQTRHDDPEDSFRWLFASFDKLREWNAELVRIDTLGQPWRRKRGLETGSEDATRIGWTRPKKWP

SEQ ID NO: 756 - protein, 1059 aa, Wolinella succinogenes DSM 1740
MIERILGVDLGISSLGWAIVEYDKDDEAANRIIDCGVRLFTAAETPKKKESPNKARREARGIRRVLNRRRVRMNMIKKLFLRAGLIQDVDLDGEGGMFYSKANRADVWELRHDGLYRLLKGDELARVLIHIAKHRGYKFIGDDEADEESGKVKKAGVVLRQNFEAAGCRTVGEWLWRERGANGKKRNKHGDYEISIHRDLLVEEVEAIFVAQQEMRSTIATDALKAAYREIAFFVRPMQRIEKMVGHCTYFPEERRAPKSAPTAEKFIAISKFFSTVIIDNEGWEQKIIERKTLEELLDFAVSREKVEFRHLRKFLDLSDNEIFKGLHYKGKPKTAKKREATLFDPNEPTELEFDKVEAEKKAWISLRGAAKLREALGNEFYGRFVALGKHADEATKILTYYKDEGQKRRELTKLPLEAEMVERLVKIGFSDFLKLSLKAIRDILPAMESGARYDEAVLMLGVPHKEKSAILPPLNKTDIDILNPTVIRAFAQFRKVANALVRKYGAFDRVHFELAREINTKGEIEDIKESQRKNEKERKEAADWIAETSFQVPLTRKNILKKRLYIQQDGRCAYTGDVIELERLFDEGYCEIDHILPRSRSADDSFANKVLCLARANQQKTDRTPYEWFGHDAARWNAFETRTSAPSNRVRTGKGKIDRLLKKNFDENSEMAFKDRNLNDTRYMARAIKTYCEQYWVFKNSHTKAPVQVRSGKLTSVLRYQWGLESKDRESHTHHAVDAIIIAFSTQGMVQKLSEYYRFKETHREKERPKLAVPLANFRDAVEEATRIENTETVKEGVEVKRLLISRPPRARVTGQAHEQTAKPYPRIKQVKNKKKWRLAPIDEEKFESFKADRVASANQKNFYETSTIPRVDVYHKKGKFHLVPIYLHEMVLNELPNLSLGTNPEAMDENFFKFSIFKDDLISIQTQGTPKKPAKIIMGYFKNMHGANMVLSSINNSPCEGFTCTPVSMDKKHKDKCKLCPEENRIAGRCLQGFLDYWSQEGLRPPRKEFECDQGVKFALDVKKYQIDPLGYYYEVKQEKRLGTIPQMRSAKKLVKK

SEQ ID NO: 757 - protein, 984 aa, Campylobacter jejuni subsp. jejuni NCTC 11168
MARILAFDIGISSIGWAFSENDELKDCGVRIFTKVENPKTGESLALPRRLARSARKRLARRKARLNHLKHLIANEFKLNYEDYQSFDESLAKAYKGSLISPYELRFRALNELLSKQDFARVILHIAKRRGYDDIKNSDDKEKGAILKAIKQNEEKLANYQSVGEYLYKEYFQKFKENSKEFTNVRNKKESYERCIAQSFLKDELKLIFKKQREFGFSFSKKFEEEVLSVAFYKRALKDFSHLVGNCSFFTDEKRAPKNSPLAFMFVALTRIINLLNNLKNTEGILYTKDDLNALLNEVLKNGTLTYKQTKKLLGLSDDYEFKGEKGTYFIEFKKYKEFIKALGEHNLSQDDLNEIAKDITLIKDEIKLKKALAKYDLNQNQIDSLSKLEFKDHLNISFKALKLVTPLMLEGKKYDEACNELNLKVAINEDKKDFLPAFNETYYKDEVTNPVVLRAIKEYRKVLNALLKKYGKVHKINIELAREVGKNHSQRAKIEKEQNENYKAKKDAELECEKLGLKINSKNILKLRLFKEQKEFCAYSGEKIKISDLQDEKMLEIDHIYPYSRSFDDSYMNKVLVFTKQNQEKLNQTPFEAFGNDSAKWQKIEVLAKNLPTKKQKRILDKNYKDKEQKNFKDRNLNDTRYIARLVLNYTKDYLDFLPLSDDENTKLNDTQKGSKVHVEAKSGMLTSALRHTWGFSAKDRNNHLHHAIDAVIIAYANNSIVKAFSDFKKEQESNSAELYAKKISELDYKNKRKFFEPFSGFRQKVLDKIDEIFVSKPERKKPSGALHEETFRKEEEFYQSYGGKEGVLKALELGKIRKVNGKIVKNGDMFRVDIFKHKKTNKFYAVPIYTMDFALKVLPNKAVARSKKGEIKDWILMDENYEFCFSLYKDSLILIQTKDMQEPEFVYYNAFTSSTVSLIVSKHDNKFETLSKNQKILFKNANEKEVIAKSIGIQNLKVFEKYIVSALGEVTKAEFRQREDFKK

SEQ ID NO: 758 - protein, 1024 aa, Helicobacter mustelae 12198
MIRTLGIDIGIASIGWAVIEGEYTDKGLENKEIVASGVRVFTKAENPKNKESLALPRTLARSARRRNARKKGRIQQVKHYLSKALGLDLECFVQGEKLATLFQTSKDFLSPWELRERALYRVLDKEELARVILHIAKRRGYDDITYGVEDNDSGKIKKAIAENSKRIKEEQCKTIGEMMYKLYFQKSLNVRNKKESYNRCVGRSELREELKTIFQIQQELKSPWVNEELIYKLLGNPDAQSKQEREGLIFYQRPLKGFGDKIGKCSHIKKGENSPYRACKHAPSAEEFVALTKSINFLKNLTNRHGLCFSQEDMCVYLGKILQEAQKNEKGLTYSKLKLLLDLPSDFEFLGLDYSGKNPEKAVFLSLPSTFKLNKITQDRKTQDKIANILGANKDWEAILKELESLQLSKEQIQTIKDAKLNFSKHINLSLEALYHLLPLMREGKRYDEGVEILQERGIFSKPQPKNRQLLPPLSELAKEESYFDIPNPVLRRALSEFRKVVNALLEKYGGFHYFHIELTRDVCKAKSARMQLEKINKKNKSENDAASQLLEVLGLPNTYNNRLKCKLWKQQEEYCLYSGEKITIDHLKDQRALQIDHAFPLSRSLDDSQSNKVLCLTSSNQEKSNKTPYEWLGSDEKKWDMYVGRVYSSNFSPSKKRKLTQKNFKERNEEDFLARNLVDTGYIGRVTKEYIKHSLSFLPLPDGKKEHIRIISGSMTSTMRSFWGVQEKNRDHHLHHAQDAIIIACIEPSMIQKYTTYLKDKETHRLKSHQKAQILREGDHKLSLRWPMSNFKDKIQESIQNIIPSHHVSHKVTGELHQETVRTKEFYYQAFGGEEGVKKALKFGKIREINQGIVDNGAMVRVDIFKSKDKGKFYAVPIYTYDFAIGKLPNKAIVQGKKNGIIKDWLEMDENYEFCFSLFKNDCIKIQTKEMQEAVLAIYKSTNSAKATIELEHLSKYALKNEDEEKMFTDTDKEKNKTMTRESCGIQGLKVFQKVKLSVLGEVLEHKPRNRQNIALKTTPKHV

SEQ ID NO: 759 - protein, 1069 aa, Bacillus cereus Rock1-15
MNYDIGLRIGITSCGWSIINKDLERIEDLGVRVFEKAENPDGTASAAPRREARKSRRKHRRKKHRIERIKRLIVQHDLLSKKELDSLYLSPFNIDVWNLQVEALERKLDNREFARVLIHLVQRRGFQTIRKSVEIQEEGKLLENVSENERIMKVNGYKTVGEMFSKHEKFTHHKRNKDGSYTSVVTRSLLLKEIKTIFNSQRILGNVFSTQKLESDYLYIWGSQRPTLTYEQLMSMVGNCIYEKKEKRAPKTSWAFQYFSLLQKINKLKVSDDNTLRKLSKEERDIVIELAFKKKNVSFVDIRKALKLNDNTKFNHLTYSHVVETKKVEKATFIELKGYHLIKKQLKDRNVELTQELQPKDYDAIAAASTFFKNDIEFRDYLRNQYLDSNGKRKSNIANKVFEDKVIAAVFELNFSKVCHLSFKSLYKLIPHLEKGLDYKEAILCAGYNFRDENKRDKKLFLPVIQQETNPVVHRALTQARKVINAIIREYGSPNTIRFVVANDLAKTYKQRKELESTLKKNRAENEKIKTKLLSMGIINPTGMDIVKYKLWYEQSGICLYTGRQMELSSLFKPGYSIVNHIIPYNRSFDDTYHNRVLTLTETKYEKGNKIPFEYFGAEETCWNEYEKRVSTSKKIHDKKREKLLIRNFDIEYENEMISNNVFDTHYIGSYFEKYIDEHLQFKKSTKKQKVFSIHGNMVAHLHSRWGFNKNSREIYLNHAVDAAIVAVLTDQLIRNIADYYRRDNILEQKGSLKFPEPWKSFSIELEARISPQVRDLIKKLNLDSYLDVDILHIKPVFISKKPRRKVNGEAHKSTIRSLIGINEIGKTVTCIKTRLEDIPFDENGDFPMYGKDTDKYTYTAIKERYLEFNKDKEKAFSTPLYKLKRNGEPGNQIKSVKIIDTRNIVNKVNQGKGIAYNSNIIRVDVFSRDQKYYVVPIYLRDFIKGSLPNKIITAAKGFMQWPETDNSYTFLFSIFPNDLIKVVPKEGKFIKAKNENKENINLTEILGYFKGLDSSTGAFTLESHDGSLLARGIGTKNLLLIEKYQVDVLGRYNKVGNEERQDIKIQQN

SEQ ID NO: 760 - protein, 1131 aa, Acidovorax ebreus TPSY
MAQHVFGLDIGIASVGWAILGEQRIIDLGVRCFDKAETAKEGDPLNLTRRQARLLRRRLYRRAWRLTQLSRLLKRKGLIADAKLFAKAPSYGDSAWELRRQGLDRLLTPLEWARVIYHQCKHRGFHWTSKAEEAKADSDAEGGRVKQGLAHTKALMQAKNYRSAAEMVLAEFPDAQRNKRGQYDKALSRVLLGEELALLFATQRRLGNPHASDFFEKLILGDGDRKSGLFWQQKPALSGADLLKMLGKCTFEKGEYRAPKASFSVERHVWLTRLNNLRIVVDGRSRPLNEAERQAALLLPYQTETSKYKTLKNAFIKAGLWGDGVRFGGLAYPSQAQIDAEKTKDPEDQFLVKLPAWHELRKAFKAAGHEALWQQISTPALDGDPTLLDQIATVLSVYKDGAEVVQQLRQLALPEPAASIAVLEKISFDKFSSLSLKALRRIVPLMQSGLRYDEAVAQIPEYGHHSQRIEPGAAKHLYLPPFYEAQRKYAGKGDHIGSMQFRDDADIPRNPVVLRALNQARKVVNALIREYGSPIAVNIEMARDLSRPLDERNKVKRAQEEFRDRNDRARSEFERDFGYKPKAAAFEKWMLYREQLGQCAYSQQPLDIQRVLDDHNYAQVDHALPYSRSYDDSKNNKVLVLTHENQNKGNRTAFEYLTSFPDGEDGERWRTFVAWVQGNKAYRMAKRNRLLRKNYGVDESKGFIDRNLNDTRYICKFFKNYVEEHLQLAARADGDTARRCVVVNGQLTAFLRARWGLTKVRGDSDRHHALDAAVVAACTHGMVKALADYSRRKEISFLQEGFPDPETGEILNPAAFDRARQHFPEPWTHFAHELKARLFTDDLAALREDMQRLGSYTTEDLGRLRTLFVSRAPQRRSGGAVHKETIYAQPESLKQQGGVIEKILLTSLKLQDFDKLLNPESNDHFVEPHRNERLYAAIRQRLEQFGGRADKAFGPDNLFHKPDKNNQPTGPVVRSIKLVRGKQTGIPIRGGLAKNDSMLRVDIFTKAGKFHLVPVYVHHRVTGLPNRAIVAFKDEDEWTLIDESFAFLFSVYPNDYVKVTLKKEQQSGYYSGADRSTGAMNLWAHDRAASVGKDGLIRGIGVKTALSVEKFNVDVLGRIYLAPPETRSGLA

SEQ ID NO: 761 - protein, 1032 aa, Unknown
  Description of unknown: uncultured Termite group 1 bacterium phylotype RsD17
MKKRILGLDIGIASVGWALVEFDDEFQDNKKKGTIIKSGVRIFTRAETPKERESLAKPRREARSQRRRIRRRVERLNSIRELFVKNGVVEEWSVSKKNPNNIYITLNQIKTPWQLRMESLDRKLTNEQFAVVLTHLAKHRGYKSLRKDDKAGKVLEAISQNKKRLNDSDYRTLGEMFCKNESYKEHKRNKGGEYINSVARELIEEEVEKIFVKQREKGNNFADVNTEREYLKIAFSQKPAGSISKMVGFCTFENGEKRAPRDSYSAELFKVLCTINNTTFTDMKTGEIRSFSKEEIGKTLETVKNVKDVKYAKIRKDLGLEDSVKFSGVDYRENAKSKGEGEIFVSMKTYHEIKSKIEKLSKEKWDNLKGNTELLDSIVNIIANLKDDESIKKEFQKLKIDEDIIDVLLNFEFKKFINLSFKALRKIIPFQFQGQKYITASTSAGYSLKQEGIKNKLVPPAKENINVAVVARAFAQTRKVINAVIRKYGQFDQINIELATELKNSKFDRSKIEEGQKKFQSQKDKIFKEVQELRGGMTPSSSLLLKYRLWREQDERCVYSGRKISFEDLLDTGFLDIDHIIPYSKSMDDSFNNKVLCLAEENRNKKNDIPFNYYQRIDRDWNLLISIITSMKNMKIAKKSRLLKQELSDIEGFIERNINDTRYATRYIKDFLENNLEFKENEFIKVKVQARSGGLTSVLSYNWGMSKDREESYFHHAKDAIIVACSTQGMVQYISKISQQYENDKDKMKKIKDKTENCIPKPWDSFRADVEESIEGIFVSFAPRHKVTGSAHKETIYSKKHLEKERYVTVKKSLDKIKLSDLENIPCNENCGIIRVLKERLEKFKNDSLKAFADPVHMPTKCPNKKGPVIRSVKIKESNKTGIEVRKGLAERGEMVRVDVFIKDKKYYLVPIYVSDFKNKDLPNKAIAALKLENEWIMIDKTYSFKFSLFKDDLIKIKKKKEEIFGYFGGVHRSTGTIKIKSRHKPKEIDEGIGSRCLLDFRKFQVDVLGNYTEVKHEKRMPAYITRKDKKH

SEQ ID NO: 762 - protein, 1065 aa, Clostridium perfringens D str. JGS1721
MNKDINYALGLDIGITSVGWAVINLDLNRIEDLGVRIFNAAENLKDGSSLALPRRLARGRRRLLRRKAYRVERVRKLILKNNILTKEELEGLFKNKEVIDVWEARVKGLDYKLSREEWAKILINFCKRRGFKSNRKNEAKDKEAGQILSSISYNIEKMKETNSRTIGEYIYNEVKNSEDSYAPLRNKFGEYKMCVSRDVIREEIHTLFEKQRELGNNFASDEIEDKYFEIFNSQRPFSNFEDLEKLVGFCTFERKKHKRAPKHCISSEEFTLYEGINKLSIIKDGEKRKLSEEERTLVVNEAFNKKEIKYTTLRKLLGLSEEELFSTLTYSIDKDISKTENTKFVSLKGYHEIKRAIEKGVSKKAWQDIENNRNLLNDIAYVLTLGKTDDEIEKQLRLRNVPEELFESLLDMSFNKFNNLSIYALEKILPFMKEGYQYNEACEKAGYNFKAIYEGVRTKKLPVIEIDEIVNPVVNRALAQTRKVINSVIDKYGSPVRINIELARDLAKNFKDRKLIEKEQKENRANLDKIRENLRELMDKEPTVVEVLKYRLWEQQRGECAYTQSQIPLERLFSPGYCEIDHIIPFSRSFDDSLSNKILVLGSENQRKGNRTPYEYFGEDSERWNSFEIWVKGSYLNYKKKANLLKKKFSEEEQRDWKARNLQDTKYICRYISNFVNNRLEFKESENKQKVITVNGRATAYLRSRWGLNKVREDGDKHHALDAAVVGVTTQGMVQKISKYSKAHELYTVRKNDEFVDVETGECVDVDEYKEIRKDILPRPWRGFSEELKLRLSDNPLEELKKSPIETYNEEFIKENVKPIFVSRVPFRKISGKLFKETIYSERAFKDGYFVSKKSLVDLKRGDLDNFYNYECDKKLYDAISERMKEFNYNGKKAFESPFRKPTKSGKEGPVVRSVKIKSAVPFKDGIPMNEGLVAKEGMVRIDIYEKEGKYFVVPVYRYQLAKGIVPKRAAIAKKDELKWPIMDQTYNFKFSIYKNDLIEVKYDKKGVYFGYYDGFDRNSASLTIEKHDNSERYRSIGLKVGVLEINKYEVDVLGNYHKVKLGGN

SEQ ID NO: 763 - protein, 1021 aa, Clostridium cellulolyticum H10
MKYTLGLDVGIASVGWAVIDKDNNKIIDLGVRCFDKAEESKTGESLATARRIARGMRRRISRRSQRLRLVKKLFVQYEIIKDSSEFNRIFDTSRDGWKDPWELRYNALSRILKPYELVQVLTHITKRRGFKSNRKEDLSTTKEGVVITSIKNNSEMLRTKNYRTIGEMIFMETPENSNKRNKVDEYIHTIAREDLLNEIKYIFSIQRKLGSPFVTEKLEHDFLNIWEFQRPFASGDSILSKVGKCTLLKEELRAPTSCYTSEYFGLLQSINNLVLVEDNNTLTLNNDQRAKIIEYAHFKNEIKYSEIRKLLDIEPEILFKAHNLTHKNPSGNNESKKFYEMKSYHKLKSTLPTDIWGKLHSNKESLDNLFYCLTVYKNDNEIKDYLQANNLDYLIEYIAKLPTFNKFKHLSLVAMKRIIPFMEKGYKYSDACNMAELDFTGSSKLEKCNKLTVEPIIENVTNPVVIRALTQARKVINAIIQKYGLPYMVNIELAREAGMTRQDRDNLKKEHENNRKAREKISDLIRQNGRVASGLDILKWRLWEDQGGRCAYSGKPIPVCDLLNDSLTQIDHIYPYSRSMDDSYMNKVLVLTDENQNKRSYTPYEVWGSTEKWEDFEARIYSMHLPQSKEKRLLNRNFITKDLDSFISRNLNDTRYISRFLKNYIESYLQFSNDSPKSCVVCVNGQCTAQLRSRWGLNKNREESDLHHALDAAVIACADRKIIKEITNYYNERENHNYKVKYPLPWHSFRQDLMETLAGVFISRAPRRKITGPAHDETIRSPKHFNKGLTSVKIPLTTVTLEKLETMVKNTKGGISDKAVYNVLKNRLIEHNNKPLKAFAEKIYKPLKNGTNGAIIRSIRVETPSYTGVFRNEGKGISDNSLMVRVDVFKKKDKYYLVPIYVAHMIKKELPSKAIVPLKPESQWELIDSTHEFLFSLYQNDYLVIKTKKGITEGYYRSCHRGTGSLSLMPHFANNKNVKIDIGVRTAISIEKYNVDILGNKSIVKGEPRRGMEKYNSFKSN

SEQ ID NO: 764 - protein, 1037 aa, Parvibaculum lavamentivorans DS-1
MERIFGFDIGTTSIGFSVIDYSSTQSAGNIQRLGVRIFPEARDPDGTPLNQQRRQKRMMRRQLRRRRIRRKALNETLHEAGFLPAYGSADWPVVMADEPYELRRRGLEEGLSAYEFGRAIYHLAQHRHFKGRELEESDTPDPDVDDEKEAANERAATLKALKNEQTTLGAWLARRPPSDRKRGIHAHRNVVAEEFERLWEVQSKFHPALKSEEMRARISDTIFAQRPVFWRKNTLGECRFMPGEPLCPKGSWLSQQRRMLEKLNNLAIAGGNARPLDAEERDAILSKLQQQASMSWPGVRSALKALYKQRGEPGAEKSLKFNLELGGESKLLGNALEAKLADMFGPDWPAHPRKQEIRHAVHERLWAADYGETPDKKRVIILSEKDRKAHREAAANSFVADFGITGEQAAQLQALKLPTGWEPYSIPALNLFLAELEKGERFGALVNGPDWEGWRRTNFPHRNQPTGEILDKLPSPASKEERERISQLRNPTVVRTQNELRKVVNNLIGLYGKPDRIRIEVGRDVGKSKREREEIQSGIRRNEKQRKKATEDLIKNGIANPSRDDVEKWILWKEGQERCPYTGDQIGFNALFREGRYEVEHIWPRSRSFDNSPRNKTLCRKDVNIEKGNRMPFEAFGHDEDRWSAIQIRLQGMVSAKGGTGMSPGKVKRFLAKTMPEDFAARQLNDTRYAAKQILAQLKRLWPDMGPEAPVKVEAVTGQVTAQLRKLWTLNNILADDGEKTRADHRHHAIDALTVACTHPGMTNKLSRYWQLRDDPRAEKPALTPPWDTIRADAEKAVSEIVVSHRVRKKVSGPLHKETTYGDTGTDIKTKSGTYRQFVTRKKIESLSKGELDEIRDPRIKEIVAAHVAGRGGDPKKAFPPYPCVSPGGPEIRKVRLTSKQQLNLMAQTGNGYADLGSNHHIAIYRLPDGKADFEIVSLFDASRRLAQRNPIVQRTRADGASFVMSLAAGEAIMIPEGSKKGIWIVQGVWASGQVVLERDTDADHSTTTRPMPNPILKDDAKKVSIDPIGRVRPSND

SEQ ID NO: 765 - protein, 1140 aa, Roseburia intestinalis L1-82
MRENGSDERRRNMDEKMDYRIGLDIGIASVGWAVLQNNSDDEPVRIVDLGVRIFDTAEIPKTGESLAGPRRAARTTRRRLRRRKHRLDRIKWLFENQGLINIDDFLKRYNMAGLPDVYQLRYEALDRKLTDEELAQVLLHIAKHRGFRSTRKAETAAKENGAVLKATDENQKRMQEKGYRTVGEMIYLDEAFRTGCSWSEKGYILTPRNKAENYQHTMLRAMLVEEVKEIFSSQRRLGNEKATEELEEKYLEIMTSQRSFDLGPGMQPDGKPSPYAMEGFSDRVGKCTFLGDQGELRGAKGTYTAEYFVALQKINHTKLVNQDGETRNFTEEERRALTLLLFTQKEVKYAAVRKKLGLPEDILFYNLNYKKAATKEEQQKENQNTEKAKFIGMPYYHDYKKCLEERVKYLTENEVRDLFDEIGMILTCYKNDDSRTERLAKLGLVPIEMEGLLAYTPTKFQHLSMKAMRNIIPFLEKGMTYDKACEEAGYDFKADSKGTKQKLLTGENVNQTINEITNPVVKRSVSQTVKVINAIIRTYGSPQAINIELAREMSKTFEERRKIKGDMEKRQKNNEDVKKQIQELGKLSPTGQDILKYRLWQEQQGICMYSGKTIPLEELFKPGYDIDHILPYSITFDDSFRNKVLVTSQENRQKGNRTPYEYMGNDEQRWNEFETRVKTTIRDYKKQQKLLKKHFSEEERSEFKERNLTDTKYITTVIYNMIRQNLEMAPLNRPEKKKQVRAVNGAITAYLRKRWGLPQKNRETDTHHAMDAVVIACCTDGMIQKISRYTKVRERCYSKGTEFVDAETGEIFRPEDYSRAEWDEIFGVHIPKPWETFRAELDVRMGDDPKGFLDTHSDVALELDYPEYIYENLRPIFVSRMPNHKVTGAAHADTIRSPRHFKDEGIVLTKTALTDLKLDKDGEIDGYYNPQSDLLLYEALKKQLLLYGNDAKKAFAQDFHKPKADGTEGPVVRKVKIQKKQTMGVFVDSGNGIAENGGMVRIDVFRVNGKYYFVPVYTADVVKKVLPNRASTAHKPYGEWKVMEDKDFLFSLYSRDLIHIKSKKDIPIKMVNGGMEGIKETYAYYIGADISAANIQGIAHDSRYKFRGLGIQSLDVLEKCQIDVLGHVSVVRSEKRMGFS

SEQ ID NO: 766 - protein, 1082 aa, Neisseria meningitidis Z2491
MAAFKPNPINYILGLDIGIASVGWAMVEIDEDENPICLIDLGVRVFERAEVPKTGDSLAMARRLARSVRRLTRRRAHRLLRARRLLKREGVLQAADFDENGLIKSLPNTPWQLRAAALDRKLTPLEWSAVLLHLIKHRGYLSQRKNEGETADKELGALLKGVADNAHALQTGDFRTPAELALNKFEKESGHIRNQRGDYSHTFSRKDLQAELILLFEKQKEFGNPHVSGGLKEGIETLLMTQRPALSGDAVQKMLGHCTFEPAEPKAAKNTYTAERFIWLTKLNNLRILEQGSERPLTDTERATLMDEPYRKSKLTYAQARKLLGLEDTAFFKGLRYGKDNAEASTLMEMKAYHAISRALEKEGLKDKKSPLNLSPELQDEIGTAFSLFKTDEDITGRLKDRIQPEILEALLKHISFDKFVQISLKALRRIVPLMEQGKRYDEACAEIYGDHYGKKNTEEKIYLPPIPADEIRNPVVLRALSQARKVINGVVRRYGSPARIHIETAREVGKSFKDRKEIEKRQEENRKDREKAAAKFREYFPNFVGEPKSKDILKLRLYEQQHGKCLYSGKEINLGRLNEKGYVEIDHALPFSRTWDDSFNNKVLVLGSENQNKGNQTPYEYFNGKDNSREWQEFKARVETSRFPRSKKQRILLQKFDEDGFKERNLNDTRYVNRFLCQFVADRMRLTGKGKKRVFASNGQITNLLRGFWGLRKVRAENDRHHALDAVVVACSTVAMQQKITRFVRYKEMNAFDGKTIDKETGEVLHQKTHFPQPWEFFAQEVMIRVFGKPDGKPEFEEADTPEKLRTLLAEKLSSRPEAVHEYVTPLFVSRAPNRKMSGQGHMETVKSAKRLDEGVSVLRVPLTQLKLKDLEKMVNREREPKLYEALKARLEAHKDDPAKAFAEPFYKYDKAGNRTQQVKAVRVEQVQKTGVWVRNHNGIADNATMVRVDVFEKGDKYYLVPIYSWQVAKGILPDRAVVQGKDEEDWQLIDDSFNFKFSLHPNDLVEVITKKARMFGYFASCHRGTGNINIRIHDLDHKIGKNGILEGIGVKTALSFQKYQIDELGKEIRPCRLKKRPPVR

SEQ ID NO: 767 - protein, 1056 aa, Pasteurella multocida subsp. multocida str. Pm70
MQTTNLSYILGLDLGIASVGWAVVEINENEDPIGLIDVGVRIFERAEVPKTGESLALSRRLARSTRRLIRRRAHRLLLAKRFLKREGILSTIDLEKGLPNQAWELRVAGLERRLSAIEWGAVLLHLIKHRGYLSKRKNESQTNNKELGALLSGVAQNHQLLQSDDYRTPAELALKKFAKEEGHIRNQRGAYTHTFNRLDLLAELNLLFAQQHQFGNPHCKEHIQQYMTELLMWQKPALSGEAILKMLGKCTHEKNEFKAAKHTYSAERFVWLTKLNNLRILEDGAERALNEEERQLLINHPYEKSKLTYAQVRKLLGLSEQAIFKHLRYSKENAESATFMELKAWHAIRKALENQGLKDTWQDLAKKPDLLDEIGTAFSLYKTDEDIQQYLTNKVPNSVINALLVSLNFDKFIELSLKSLRKILPLMEQGKRYDQACREIYGHHYGEANQKTSQLLPAIPAQEIRNPVVLRTLSQARKVINAIIRQYGSPARVHIETGRELGKSFKERREIQKQQEDNRTKRESAVQKFKELFSDFSSEPKSKDILKFRLYEQQHGKCLYSGKEINIHRLNEKGYVEIDHALPFSRTWDDSFNNKVLVLASENQNKGNQTPYEWLQGKINSERWKNFVALVLGSQCSAAKKQRLLTQVIDDNKFIDRNLNDTRYIARFLSNYIQENLLLVGKNKKNVFTPNGQITALLRSRWGLIKARENNNRHHALDAIVVACATPSMQQKITRFIRFKEVHPYKIENRYEMVDQESGEIISPHFPEPWAYFRQEVNIRVFDNHPDTVLKEMLPDRPQANHQFVQPLFVSRAPTRKMSGQGHMETIKSAKRLAEGISVLRIPLTQLKPNLLENMVNKEREPALYAGLKARLAEFNQDPAKAFATPFYKQGGQQVKAIRVEQVQKSGVLVRENNGVADNASIVRTDVFIKNNKFFLVPIYTWQVAKGILPNKAIVAHKNEDEWEEMDEGAKFKFSLFPNDLVELKTKKEYFFGYYIGLDRATGNISLKEHDGEISKGKDGVYRVGVKLALSFEKYQVDELGKNRQICRPQQRQPVR

SEQ ID NO: 768 - protein, 1422 aa, Sutterella wadsworthensis 3 1 45B
MTQSERRFSCSIGIDMGAKYTGVFYALFDREELPTNLNSKAMTLVMPETGPRYVQAQRTAVRHRLRGQKRYTLARKLAFLVVDDMIKKQEKRLTDEEWKRGREALSGLLKRRGYSRPNADGEDLTPLENVRADVFAAHPAFSTYFSEVRSLAEQWEEFTANISNVEKFLGDPNIPADKEFIEFAVAEGLIDKTEKKAYQSALSTLRANANVLTGLRQMGHKPRSEYFKAIEADLKKDSRLAKINEAFGGAERLARLLGNLSNLQLRAERWYFNAPDIMKDRGWEPDRFKKTLVRAFKFFHPAKDQNKQHLELIKQIENSEDIIETLCTLDPNRTIPPYEDQNNRRPPLDQTLLLSPEKLTRQYGEIWKTWSARLTSAEPTLAPAAEILERSTDRKSRVAVNGHEPLPTLAYQLSYALQRAFDRSKALDPYALRALAAGSKSNKLTSARTALENCIGGQNVKTFLDCARRYYREADDAKVGLWFDNADGLLERSDLHPPMKKKILPLLVANILQTDETTGQKFLDEIWRKQIKGRETVASRCARIETVRKSFGGGFNIAYNTAQYREVNKLPRNAQDKELLTIRDRVAETADFIAANLGLSDEQKRKFANPFSLAQFYTLIETEVSGFSATTLAVHLENAWRMTIKDAVINGETVRAAQCSRLPAETARPFDGLVRRLVDRQAWEIAKRVSTDIQSKVDFSNGIVDVSIFVEENKFEFSASVADLKKNKRVKDKMLSEAEKLETRWLIKNERIKKASRGTCPYTGDRLAEGGEIDHILPRSLIKDARGIVFNAEPNLIYASSRGNQLKKNQRYSLSDLKANYRNEIFKTSNIAAITAEIEDVVTKLQQTHRLKFFDLLNEHEQDCVRHALFLDDGSEARDAVLELLATQRRTRVNGTQIWMIKNLANKIREELQNWCKTTNNRLHFQAAATNVSDAKNLRLKLAQNQPDFEKPDIQPIASHSIDALCSFAVGSADAERDQNGFDYLDGKTVLGLYPQSCEVIHLQAKPQEEKSHFDSVAIFKEGIYAEQFLPIFTLNEKIWIGYETLNAKGERCGAIEVSGKQPKELLEMLAPFFNKPVGDLSAHATYRILKKPAYEFLAKAALQPLSAEEKRLAALLDALRYCTSRKSLMSLFMAANGKSLKKREDVLKPKLFQLKVELKGEKSFKLNGSLTLPVKQDWLRICDSPELADAFGKPCSADELTSKLARIWKRPVMRDLAHAPVRREFSLPAIDNPSGGFRIRRTNLFGNELYQVHAINAKKYRGFASAGSNVDWSKGILFNELQHENLTECGGRFITSADVTPMSEWRKVVAEDNLSIWIAPGTEGRRYVRVETTFIQASHWFEQSVENWAITSPLSLPASFKVDKPAEFQKAVGTELSELLGQPRSEIFIENVGNAKHIRFWYIVVSSNKKMNESYNNVSKS

SEQ ID NO: 769 - protein, 1397 aa, gamma proteobacterium HTCC5015
MTKNYISPIAIDLGAKFTGVALYQYLEGADCTQEVAKGLLVDDRGNVTWSQEGRRGKRHQVRGYKRRKMAKRLLWLILDSEYGIKREEVTEPLLKFINGLLNRRGYTYISEEVDEESMNVSPLPFSEMMPDYFNSSAPLLEQLAKLLSDKNKLVRFRAEGKIPSNKNEFKKLLDTALDGKYKDEKKELSEAWGNILIASENVLKSTVDGHKSRSEYLANIKEDIKSNEELEKQISSKEIDGFYNLVGHLSNFQLRLLRKYFNDPNMSGVSYWDEKRLEKYFYQWVQGWHTKGGTDEAEKKNIILKTKGAPLLKTLKSLSADLTIPPYEDQNNRRPPKCQSVLLSDEKLTMHYPKWKEWVGQLVKQNDNAYLNENVTLANALHRIVERSRSIDPYQLRLLISITDAEKRNDLAGYKRLKLSLGSEVDEFLLLVKNIVDETKEAREGLWFETENKLFFKCGKTPPRKEKLKSTLLSAVLGKNLSDDEQSSFIEEFWKSGTPKIERRNVRGWCRLASQVQKTYGVYLKEYGLQQLHKLEAGKKLDDKPLALLYKNSGLIASKIGEALNIEPDEVSRFASPHSLAQIFNIIEGDVAGFNKTCRACTYENIWRMQEEKVESLLTNQLLSEIHGERKVPLKSAMCTRLSADSTRPFDGQMASIIEHIARKIAQHKIAQINDVPKEFSIDIPIIIESNQFSFTAELEEIKRGRGSAKAKKAKELGEKSKAGWVSKTERIKTSSEGICPYTGAPLGGSGEIDHIIPRSLTGRTKKTVFNSEANLIYCSSKGNHDKGNRVYVIEQLNDKYLKKQFSTSDVNLIKKKIKTTIQRFTEGGEKLRSFSELSREDQKAFRHALFVPELKSEVTSLLAVKNITRVNGTQAWLAKKIASLLAEHLDKQGRDYTLSAHQIDPWSVSKQRKMLASAEPIWAKKDPQPAASHVVDAVCTFLEALEQPHTASRLKTISSTSFEKTGWRSALIPDLIKVDALDRRPKYRRYNIGSTSLFKDGIYAERFLPILIDENGLMAGYDIDNSLKAKGADVVFESLSPFLLFKGEEVGAQSLSDWQERIDGRYLYMSIDKVKAFDYLQEKVGEKDIAAELLNSIHFTQRKTELRAKFSDDSGKKMKTLDAIRKSLKLTVTVNEIGKRKEKCGFSGTIGIPAKSAWENLLDEPLLETYWGTKMPPQEIWEKVYRKHFPRNIPNQAHRKVRKDFSLPVVDSVSGGFRVKRKTPNGYNYQLLAIDGYSAVGFKKEGDNVDFKSPALVPQIAESKSVTPISSELVHLDKNEIVYFDEWRKIDISDSDLKQFVSSLELAPGSQNRFYIRFTVDEDQFERHFKSALRVNGIQDLDTVNKTFDWNREIPSLLIPPRSNLFLLETGQKITFEYIANGANAEVKKAYSLRRA

SEQ ID NO: 770 - protein, 1372 aa, Legionella pneumophila str. Paris
MESSQILSPIGIDLGGKFTGVCLSHLEAFAELPNHANTKYSVILIDHNNFQLSQAQRRATRHRVRNKKRNQFVKRVALQLFQHILSRDLNAKEETALCHYLNNRGYTYVDTDLDEYIKDETTINLLKELLPSESEHNFIDWFLQKMQSSEFRKILVSKVEEKKDDKELKNAVKNIKNFITGFEKNSVEGHRHRKVYFENIKSDITKDNQLDSIKKKIPSVCLSNLLGHLSNLQWKNLHRYLAKNPKQFDEQTFGNEFLRMLKNFRHLKGSQESLAVRNLIQQLEQSQDYISILEKTPPEITIPPYEARTNTGMEKDQSLLLNPEKLNNLYPNWRNLIPGIIDAHPFLEKDLEHTKLRDRKRIISPSKQDEKRDSYILQRYLDLNKKIDKFKIKKQLSFLGQGKQLPANLIETQKEMETHFNSSLVSVLIQIASAYNKEREDAAQGIWFDNAFSLCELSNINPPRKQKILPLLVGAILSEDFINNKDKWAKFKIFWNTHKIGRTSLKSKCKEIEEARKNSGNAFKIDYEEALNHPEHSNNKALIKIIQTIPDIIQAIQSHLGHNDSQALIYHNPFSLSQLYTILETKRDGFHKNCVAVTCENYWRSQKTEIDPEISYASRLPADSVRPFDGVLARMMQRLAYEIAMAKWEQIKHIPDNSSLLIPIYLEQNRFEFEESFKKIKGSSSDKTLEQAIEKQNIQWEEKFQRIINASMNICPYKGASIGGQGEIDHIYPRSLSKKHFGVIFNSEVNLIYCSSQGNREKKEEHYLLEHLSPLYLKHQFGTDNVSDIKNFISQNVANIKKYISFHLLTPEQQKAARHALFLDYDDEAFKTITKFLMSQQKARVNGTQKFLGKQIMEFLSTLADSKQLQLEFSIKQITAEEVHDHRELLSKQEPKLVKSRQQSFPSHAIDATLTMSIGLKEFPQFSQELDNSWFINHLMPDEVHLNPVRSKEKYNKPNISSTPLFKDSLYAERFIPVWVKGETFAIGFSEKDLFEIKPSNKEKLFTLLKTYSTKNPGESLQELQAKSKAKWLYFPINKTLALEFLHHYFHKEIVTPDDTTVCHFINSLRYYTKKESITVKILKEPMPVLSVKFESSKKNVLGSFKHTIALPATKDWERLFNHPNFLALKANPAPNPKEFNEFIRKYFLSDNNPNSDIPNNGHNIKPQKHKAVRKVFSLPVIPGNAGTMMRIRRKDNKGQPLYQLQTIDDTPSMGIQINEDRLVKQEVLMDAYKTRNLSTIDGINNSEGQAYATFDNWLTLPVSTFKPEIIKLEMKPHSKTRRYIRITQSLADFIKTIDEALMIKPSDSIDDPLNMPNEIVCKNKLFGNELKPRDGKMKIVSTGKIVTYEFESDSTPQWIQTLYVTQLKKQP

SEQ ID NO: 771 - protein, 1428 aa, Parasutterella excrementihominis YIT 11859
MGKTHIIGVGLDLGGTYTGTFITSHPSDEAEHRDHSSAFTVVNSEKLSFSSKSRTAVRHRVRSYKGFDLRRRLLLLVAEYQLLQKKQTLAPEERENLRIALSGYLKRRGYARTEAETDTSVLESLDPSVFSSAPSFTNFFNDSEPLNIQWEAIANSPETTKALNKELSGQKEADFKKYIKTSFPEYSAKEILANYVEGRRAILDASKYIANLQSLGHKHRSKYLSDILQDMKRDSRITRLSEAFGSTDNLWRIIGNISNLQERAVRWYFNDAKFEQGQEQLDAVKLKNVLVRALKYLRSDDKEWSASQKQIIQSLEQSGDVLDVLAGLDPDRTIPPYEDQNNRRPPEDQTLYLNPKALSSEYGEKWKSWANKFAGAYPLLTEDLTEILKNTDRKSRIKIRSDVLPDSDYRLAYILQRAFDRSIALDECSIRRTAEDFENGVVIKNEKLEDVLSGHQLEEFLEFANRYYQETAKAKNGLWFPENALLERADLHPPMKNKILNVIVGQALGVSPAEGTDFIEEIWNSKVKGRSTVRSICNAIENERKTYGPYFSEDYKFVKTALKEGKTEKELSKKFAAVIKVLKMVSEVVPFIGKELRLSDEAQSKFDNLYSLAQLYNLIETERNGFSKVSLAAHLENAWRMTMTDGSAQCCRLPADCVRPFDGFIRKAIDRNSWEVAKRIAEEVKKSVDFTNGTVKIPVAIEANSFNFTASLTDLKYIQLKEQKLKKKLEDIQRNEENQEKRWLSKEERIRADSHGICAYTGRPLDDVGEIDHIIPRSLTLKKSESIYNSEVNLIFVSAQGNQEKKNNIYLLSNLAKNYLAAVFGTSDLSQITNEIESTVLQLKAAGRLGYFDLLSEKERACARHALFLNSDSEARRAVIDVLGSRRKASVNGTQAWFVRSIFSKVRQALAAWTQETGNELIFDAISVPAADSSEMRKRFAEYRPEFRKPKVQPVASHSIDAMCIYLAACSDPFKTKRMGSQLAIYEPINFDNLFTGSCQVIQNTPRNFSDKTNIANSPIFKETIYAERFLDIIVSRGEIFIGYPSNMPFEEKPNRISIGGKDPFSILSVLGAYLDKAPSSEKEKLTIYRVVKNKAFELFSKVAGSKFTAEEDKAAKILEALHFVTVKQDVAATVSDLIKSKKELSKDSIENLAKQKGCLKKVEYSSKEFKFKGSLIIPAAVEWGKVLWNVFKENTAEELKDENALRKALEAAWPSSFGTRNLHSKAKRVFSLPVVATQSGAVRIRRKTAFGDFVYQSQDTNNLYSSFPVKNGKLDWSSPIIHPALQNRNLTAYGYRFVDHDRSISMSEFREVYNKDDLMRIELAQGTSSRRYLRVEMPGEKFLAWFGENSISLGSSFKFSVSEVFDNKIYTENAEFTKFLPKPREDNKHNGTIFFELVGPRVIFNYIVGGAASSLKEIFSEAGKERS

SEQ ID NO: 772 - protein, 1409 aa, Wolinella succinogenes DSM 1740
MLVSPISVDLGGKNTGFFSFTDSLDNSQSGTVIYDESFVLSQVGRRSKRHSKRNNLRNKLVKRLFLLILQEHHGLSIDVLPDEIRGLFNKRGYTYAGFELDEKKKDALESDTLKEFLSEKLQSIDRDSDVEDFLNQIASNAESFKDYKKGFEAVFASATHSPNKKLELKDELKSEYGENAKELLAGLRVTKEILDEFDKQENQGNLPRAKYFEELGEYIATNEKVKSFFDSNSLKLTDMTKLIGNISNYQLKELRRYFNDKEMEKGDIWIPNKLHKITERFVRSWHPKNDADRQRRAELMKDLKSKEIMELLTTTEPVMTIPPYDDMNNRGAVKCQTLRLNEEYLDKHLPNWRDIAKRLNHGKFNDDLADSTVKGYSEDSTLLHRLLDTSKEIDIYELRGKKPNELLVKTLGQSDANRLYGFAQNYYELIRQKVRAGIWVPVKNKDDSLNLEDNSNMLKRCNHNPPHKKNQIHNLVAGILGVKLDEAKFAEFEKELWSAKVGNKKLSAYCKNIEELRKTHGNTFKIDIEELRKKDPAELSKEEKAKLRLTDDVILNEWSQKIANFFDIDDKHRQRFNNLFSMAQLHTVIDTPRSGFSSTCKRCTAENRFRSETAFYNDETGEFHKKATATCQRLPADTQRPFSGKIERYIDKLGYELAKIKAKELEGMEAKEIKVPIILEQNAFEYEESLRKSKTGSNDRVINSKKDRDGKKLAKAKENAEDRLKDKDKRIKAFSSGICPYCGDTIGDDGEIDHILPRSHTLKIYGTVFNPEGNLIYVHQKCNQAKADSIYKLSDIKAGVSAQWIEEQVANIKGYKTFSVLSAEQQKAFRYALFLQNDNEAYKKVVDWLRTDQSARVNGTQKYLAKKIQEKLTKMLPNKHLSFEFILADATEVSELRRQYARQNPLLAKAEKQAPSSHAIDAVMAFVARYQKVFKDGTPPNADEVAKLAMLDSWNPASNEPLTKGLSTNQKIEKMIKSGDYGQKNMREVFGKSIFGENAIGERYKPIVVQEGGYYIGYPATVKKGYELKNCKVVTSKNDIAKLEKIIKNQDLISLKENQYIKIFSINKQTISELSNRYFNMNYKNLVERDKEIVGLLEFIVENCRYYTKKVDVKFAPKYIHETKYPFYDDWRRFDEAWRYLQENQNKTSSKDRFVIDKSSLNEYYQPDKNEYKLDVDTQPIWDDFCRWYFLDRYKTANDKKSIRIKARKTFSLLAESGVQGKVFRAKRKIPTGYAYQALPMDNNVIAGDYANILLEANSKTLSLVPKSGISIEKQLDKKLDVIKKTDVRGLAIDNNSFFNADFDTHGIRLIVENTSVKVGNFPISAIDKSAKRMIFRALFEKEKGKRKKKTTISFKESGPVQDYLKVFLKKIVKIQLRTDGSISNIVVRKNAADFTLSFRSEHIQKLLK

SEQ ID NO: 773 - protein, 1629 aa, Francisella novicida U112
MNFKILPIAIDLGVKNTGVFSAFYQKGTSLERLDNKNGKVYELSKDSYTLLMNNRTARRHQRRGIDRKQLVKRLFKLIWTEQLNLEWDKDTQQAISFLFNRRGFSFITDGYSPEYLNIVPEQVKAILMDIFDDYNGEDDLDSYLKLATEQESKISEIYNKLMQKILEFKLMKLCTDIKDDKVSTKTLKEITSYEFELLADYLANYSESLKTQKFSYTDKQGNLKELSYYHHDKYNIQEFLKRHATINDRILDTLLTDDLDIWNFNFEKFDFDKNEEKLQNQEDKDHIQAHLHHFVFAVNKIKSEMASGGRHRSQYFQEITNVLDENNHQEGYLKNFCENLHNKKYSNLSVKNLVNLIGNLSNLELKPLRKYFNDKIHAKADHWDEQKFTETYCHWILGEWRVGVKDQDKKDGAKYSYKDLCNELKQKVTKAGLVDFLLELDPCRTIPPYLDNNNRKPPKCQSLILNPKFLDNQYPNWQQYLQELKKLQSIQNYLDSFETDLKVLKSSKDQPYFVEYKSSNQQIASGQRDYKDLDARILQFIFDRVKASDELLLNEIYFQAKKLKQKASSELEKLESSKKLDEVIANSQLSQILKSQHTNGIFEQGTFLHLVCKYYKQRQRARDSRLYIMPEYRYDKKLHKYNNTGRFDDDNQLLTYCNHKPRQKRYQLLNDLAGVLQVSPNFLKDKIGSDDDLFISKWLVEHIRGFKKACEDSLKIQKDNRGLLNHKINIARNTKGKCEKEIFNLICKIEGSEDKKGNYKHGLAYELGVLLFGEPNEASKPEFDRKIKKFNSIYSFAQIQQIAFAERKGNANTCAVCSADNAHRMQQIKITEPVEDNKDKIILSAKAQRLPAIPTRIVDGAVKKMATILAKNIVDDNWQNIKQVLSAKHQLHIPIITESNAFEFEPALADVKGKSLKDRRKKALERISPENIFKDKNNRIKEFAKGISAYSGANLTDGDFDGAKEELDHIIPRSHKKYGTLNDEANLICVTRGDNKNKGNRIFCLRDLADNYKLKQFETTDDLEIEKKIADTIWDANKKDFKFGNYRSFINLTPQEQKAFRHALFLADENPIKQAVIRAINNRNRTFVNGTQRYFAEVLANNIYLRAKKENLNTDKISFDYFGIPTIGNGRGIAEIRQLYEKVDSDIQAYAKGDKPQASYSHLIDAMLAFCIAADEHRNDGSIGLEIDKNYSLYPLDKNTGEVFTKDIFSQIKITDNEFSDKKLVRKKAIEGFNTHRQMTRDGIYAENYLPILIHKELNEVRKGYTWKNSEEIKIFKGKKYDIQQLNNLVYCLKFVDKPISIDIQISTLEELRNILTTNNIAATAEYYYINLKTQKLHEYYIENYNTALGYKKYSKEMEFLRSLAYRSERVKIKSIDDVKQVLDKDSNFIIGKITLPFKKEWQRLYREWQNTTIKDDYEFLKSFFNVKSITKLHKKVRKDFSLPISTNEGKFLVKRKTWDNNFIYQILNDSDSRADGTKPFIPAFDISKNEIVEAIIDSFTSKNIFWLPKNIELQKVDNKNIFAIDTSKWFEVETPSDLRDIGIATIQYKIDNNSRPKVRVKLDYVIDDDSKINYFMNHSLLKSRYPDKVLEILKQSTIIEFESSGFNKTIKEMLGMKLAGIYNETSNN

SEQ ID NO: 774 - DNA, 27 bp, Artificial Sequence
  Description of artificial sequence: Synthetic oligonucleotide
  modified_base (25)..(25): n is a, c, t, g, uknown or other
  misc_feature (25)..(25): n is a, c, g, or t
gataatctcttatagaattgaaagngg

SEQ ID NO: 775 - DNA, 27 bp, Artificial Sequence
  Description of artificial sequence: Synthetic oligonucleotide
  modified_base (25)..(25): n is a, c, t, g, unknown or other
  misc_feature (25)..(25): n is a, c, g, or t
gttaatcttctatagagttgaaagngg

SEQ ID NO: 776 - DNA, 33 bp, Artificial Sequence
  Description of artificial sequence: Synthetic oligonucleotide
  modified_base (31)..(31): n is a, c, t, g, unknown or other
  misc_feature (31)..(31): n is a, c, g, or t
gttaaaatcagaccaaaatgggattgaaatngg

SEQ ID NO: 777 - DNA, 32 bp, Artificial Sequence
  Description of artificial sequence: Synthetic oligonucleotide
  modified_base (30)..(30): n is a, c, t, g, unknown or other
  misc_feature (30)..(30): n is a, c, g, or t
gttttaactacttattatgaaatctaaatngg

SEQ ID NO: 778 - DNA, 35 bp, Artificial Sequence
  Description of artificial sequence: Synthetic oligonucleotide
gtctcacccttcatgggtgagtggattgaaatgaa

SEQ ID NO: 779 - DNA, 34 bp, Artificial Sequence
  Description of artificial sequence: Synthetic oligonucleotide
gtcgcgtcctcacgggcgcgtggattgaaacgaa

SEQ ID NO: 780 - DNA, 32 bp, Artificial Sequence
  Description of artificial sequence: Synthetic oligonucleotide
gwgttccccgcgccagcggggataaaccgctt

SEQ ID NO: 781 - DNA, 32 bp, Artificial Sequence
  Description of artificial sequence: Synthetic oligonucleotide
gtgttccccacatgcgtggggatgaaccgctt

SEQ ID NO: 782 - DNA, 32 bp, Artificial Sequence
  Description of artificial sequence: Synthetic oligonucleotide
gwgttccccgcgccagcggggataaaccgcat

SEQ ID NO: 783 - DNA, 32 bp, Artificial Sequence
  Description of artificial sequence: Synthetic oligonucleotide
gwgttccccgcgccagcggggataaaccgcct

SEQ ID NO: 784 - DNA, 32 bp, Artificial Sequence
  Description of artificial sequence: Synthetic oligonucleotide
gwgttccccgcgccagcggggataaaccgctc

SEQ ID NO: 785 - DNA, 30 bp, Artificial Sequence
  Description of artificial sequence: Synthetic oligonucleotide
gttcactgccgtgtaggcagctaagaaagg

SEQ ID NO: 786 - DNA, 30 bp, Artificial Sequence
  Description of artificial sequence: Synthetic oligonucleotide
gttcaccgccgcacaggcggcttagaaagg

SEQ ID NO: 787 - DNA, 43 bp, Artificial Sequence
  Description of artificial sequence: Synthetic oligonucleotide
  modified_base (6)..(7): n is a, c, t, g, unknown, or other
  misc_feature (6)..(7): n is a, c, g, or t
wttctnngtttttgtactctcaagatttaagtaactgtacaac

SEQ ID NO: 788 - DNA, 44 bp, Artificial Sequence
  Description of artificial sequence: Synthetic oligonucleotide
  modified_base (6)..(8): n is a, c, t, g, unknown or other
  misc_feature (6)..(8): n is a, c, g, or t
tttyrnnngtttttgtactctcaagatttaagtaactgtacaac

SEQ ID NO: 789 - DNA, 41 bp, Artificial Sequence
  Description of artificial sequence: Synthetic oligonucleotide
  modified_base (2)..(2): n is a, c, t, g, unknown or other
  misc_feature (2)..(2): n is a, c, g, or t
  modified_base (5)..(5): n is a, c, t, g, unknown or other
  misc_feature (5)..(5): n is a, c, g, or t
cnccngttttagagctgtgttgtttcgaatggttccaaaac

SEQ ID NO: 790 - DNA, 39 bp, Artificial Sequence
  Description of artificial sequence: Synthetic oligonucleotide
  modified_base (3)..(3): n is a, c, t, g, unknown or other
  misc_feature (3)..(3): n is a, c, g, or t
ccngttttagagctatgctgttttgaatggtcccaaaac

SEQ ID NO: 791 - DNA, 39 bp, Artificial Sequence
  Description of artificial sequence: Synthetic oligonucleotide
  modified_base (3)..(3): n is a, c, t, g, unknown or other
  misc_feature (3)..(3): n is a, c, g, or t
ccngttttagagctatgttattttgaatgctaccaaaac

1-16. (canceled)

17. A regulatable-AAV particle comprising a viral genome, said viral genome comprising:
(a) at least one sequence encoding at least one payload; and
(b) at least one sequence encoding at least one regulatable element.

18. The regulatable-AAV particle of claim 17, wherein the regulatable-AAV particle has a serotype selected from the group consisting of AAV1, AAV2, AAV2G9, AAV3, AAV3a, AAV3b, AAV3-3, AAV4, AAV4-4, AAV5, AAV6, AAV6.1, AAV6.2, AAV6.1.2, AAV7, AAV7.2, AAV8, AAV9, AAV9.11, AAV9.13, AAV9.16, AAV9.24, AAV9.45, AAV9.47, AAV9.61, AAV9.68, AAV9.84, AAV9.9, AAV10, AAV11, AAV12, AAV16.3, AAV24.1, AAV27.3, AAV42.12, AAV42-1b, AAV42-2, AAV42-3a, AAV42-3b, AAV42-4, AAV42-5a, AAV42-5b, AAV42-6b, AAV42-8, AAV42-10, AAV42-11, AAV42-12, AAV42-13, AAV42-15, AAV42-aa, AAV43-1, AAV43-12, AAV43-20, AAV43-21, AAV43-23, AAV43-25, AAV43-5, AAV44.1, AAV44.2, AAV44.5, AAV223.1, AAV223.2, AAV223.4, AAV223.5, AAV223.6, AAV223.7, AAV1-7/rh.48, AAV1-8/rh.49, AAV2-15/rh.62, AAV2-3/rh.61, AAV2-4/rh.50, AAV2-5/rh.51, AAV3.1/hu.6, AAV3.1/hu.9, AAV3-9/rh.52, AAV3-11/rh.53, AAV4-8/rh.64, AAV4-9/rh.54, AAV4-19/rh.55, AAV5-3/rh.57, AAV5-22/rh.58, AAV7.3/hu.7, AAV16.8/hu.10, AAV16.12/hu.11, AAV29.3/bb.1, AAV29.5/bb.2, AAV106.1/hu.37, AAV114.3/hu.40, AAV127.2/hu.41, AAV127.5/hu.42, AAV128.3/hu.44, AAV130.4/hu.48, AAV145.1/hu.53, AAV145.5/hu.54, AAV145.6/hu.55, AAV161.10/hu.60, AAV161.6/hu.61, AAV33.12/hu.17, AAV33.4/hu.15, AAV33.8/hu.16, AAV52/hu.19, AAV52.1/hu.20, AAV58.2/hu.25, AAVA3.3, AAVA3.4, AAVA3.5, AAVA3.7, AAVC1, AAVC2, AAVC5, AAV-DJ, AAV-DJ8, AAVF3, AAVF5, AAVH2, AAVH6, AAVLK03, AAVH-1/hu.1, AAVH-5/hu.3, AAVLG-10/rh.40, AAVLG-4/rh.38, AAVLG-9/hu.39, AAVN721-8/rh.43, AAVCh.5, AAVCh.5R1, AAVcy.2, AAVcy.3, AAVcy.4, AAVcy.5, AAVCy.5R1, AAVCy.5R2, AAVCy.5R3, AAVCy.5R4, AAVcy.6, AAVhu.1, AAVhu.2, AAVhu.3, AAVhu.4, AAVhu.5, AAVhu.6, AAVhu.7, AAVhu.9, AAVhu.10, AAVhu.11, AAVhu.13, AAVhu.15, AAVhu.16, AAVhu.17, AAVhu.18, AAVhu.20, AAVhu.21, AAVhu.22, AAVhu.23.2, AAVhu.24, AAVhu.25, AAVhu.27, AAVhu.28, AAVhu.29, AAVhu.29R, AAVhu.31, AAVhu.32, AAVhu.34, AAVhu.35, AAVhu.37, AAVhu.39, AAVhu.40, AAVhu.41, AAVhu.42, AAVhu.43, AAVhu.44, AAVhu.44R1, AAVhu.44R2, AAVhu.44R3, AAVhu.45, AAVhu.46, AAVhu.47, AAVhu.48, AAVhu.48R1, AAVhu.48R2, AAVhu.48R3, AAVhu.49, AAVhu.51, AAVhu.52, AAVhu.54, AAVhu.55, AAVhu.56, AAVhu.57, AAVhu.58, AAVhu.60, AAVhu.61, AAVhu.63, AAVhu.64, AAVhu.66, AAVhu.67, AAVhu.14/9, AAVhu.t 19, AAVrh.2, AAVrh.2R, AAVrh.8, AAVrh.8R, AAVrh.10, AAVrh.12, AAVrh.13, AAVrh.13R, AAVrh.14, AAVrh.17, AAVrh.18, AAVrh.19, AAVrh.20, AAVrh.21, AAVrh.22, AAVrh.23, AAVrh.24, AAVrh.25, AAVrh.31, AAVrh.32, AAVrh.33, AAVrh.34, AAVrh.35, AAVrh.36, AAVrh.37, AAVrh.37R2, AAVrh.38, AAVrh.39, AAVrh.40, AAVrh.46, AAVrh.48, AAVrh.48.1, AAVrh.48.1.2, AAVrh.48.2, AAVrh.49, AAVrh.51, AAVrh.52, AAVrh.53, AAVrh.54, AAVrh.56, AAVrh.57, AAVrh.58, AAVrh.61, AAVrh.64, AAVrh.64R1, AAVrh.64R2, AAVrh.67, AAVrh.73, and/or AAVrh.74.

19. The regulatable-AAV particle of claim 18, wherein the at least one payload comprises a dsRNA, siRNA, miRNA, a wild type mRNA, or engineered precursor thereof.

20. (canceled)

21. The regulatable-AAV particle of claim 17, wherein the at least one sequence encoding at least one regulatable element comprises a domain selected from the group consisting of a DNA binding domain, a transactivation domain or a repressor domain and a ligand binding domain.

22. The regulatable-AAV particle of claim 21, wherein the at least one sequence encoding at least one regulatable element comprises a DNA binding domain and wherein the DNA binding domain is selected from the group consisting of Gal4, CREB, HSF, ZFHD1, Ecdysone Receptor, glucocorticoid receptor, RXR, RAR, Stat proteins, myc, zinc finger nuclease, TAL effectors and RNA guided DNA binding domains.

23. The regulatable-AAV particle of claim 21, wherein the at least one sequence encoding at least one regulatable element comprises a transactivation domain and wherein the transactivation domain is selected from the group consisting of Gal4, Oaf1, Leu3, Rtg3, Pho4, Gln3, Gcn4, p53, RTg3, CREB, Gli3, E2A, HSF1, NF-IL6, myc, NFAT, NF-κB and VP16.

24. The regulatable-AAV particle of claim 21, wherein the at least one sequence encoding at least one regulatable element comprises a repressor domain and wherein the repressor domain is selected from KRAB, ERD, or SID.

25. The regulatable-AAV particle of claim 21, wherein the at least one sequence encoding at least one regulatable element comprises a ligand binding domain and wherein the ligand binding domain is selected from the group consisting of Ecdysone Receptor, glucocorticoid receptor, RXR, RAR, tet repressor, and rapamycin and rapamycin analog binding domains.

26. The regulatable-AAV particle of claim 17, wherein the at least one sequence encoding at least one regulatable element comprises an enzyme to cleave the payload product.

27. The regulatable-AAV particle of claim 26, wherein the enzyme is selected from the group consisting of meganuclease, zinc finger nuclease, TALEN, recombinase, integrase, Cas9 and Cpf1.

28. The regulatable-AAV particle of claim 27, wherein the enzyme is Cas9 and the at least one regulatable element further comprises a single guide RNA (sgRNA).

29. The regulatable-AAV particle of claim 28, wherein the sgRNA is located upstream (5′) of the cas9 enzyme.

30. The regulatable-AAV particle of claim 28, wherein the sgRNA is located downstream (3′) of the cas9 enzyme.

31. The regulatable-AAV particle of claim 28, wherein the Cas9 is a Cas9 orthologue.

32. The regulatable-AAV particle of claim 27, wherein the enzyme is Cpf1 and the at least one regulatable element further comprises a single guide RNA (sgRNA).

33. The regulatable-AAV particle of claim 28, wherein the sgRNA is located downstream (3′) of the Cpf1 enzyme.

34-40. (canceled)

41. The regulatable-AAV particle of claim 17, wherein at least one sequence encoding at least one regulatable element is located in a VP2 capsid.

42-43. (canceled)

44. The regulatable-AAV particle of claim 17, wherein the at least one sequence encoding at least one regulatable element is a cas9 endonuclease fused to a destabilizing domain.

45. The regulatable-AAV particle of claim 44, wherein the destabilizing domain is from a protein family selected from the group consisting of FK506 Binding Protein (FKBP), E. coli dihyrofolate reductase (DHFR), mouse ornithine decarboxylase (MODC), and estrogen receptors (ER).

46. The regulatable-AAV particle of claim 45, wherein the destabilizing domain is from the estrogen receptor protein family.

47-48. (canceled)
